United States Patent Application Publication US 2026/0226437 A1 - sequence listing, part 2

SEQ ID NO: 3780 - protein, 1052 aa, Apophysomyces variabilis
MNYEKKSIRGYIWNFPELQENKNPTRAALEKFKEKFMNRNKTPKGLITSSGSSDHLFKTLKEKYGTKASPSAPEQHFKGPDKLLKKITDHEIQAASIKDSKRKASDKHGDDSEGGNRSGDEPSEDEEQSDDEDDNHQEYIRVATTTLRKLVRPDIDLDTVLRGDVYQFIGYDNYSTQINLADVFPADYDFGNHKAKHSIVSLPFINADAGVDANIFSFAQFQNMFYSTVGGIYTEQIPKPWFSINGVLSSLVDPDDDAVASQFQADSFRALYTAANNIYSGSLYPRSLTNVIRLLLRVNLAPRRMSKYMQLVKKKAEEKKDRQEQRKGLRSNVQRRCNRSYWTKELKKAYMNGRPDNVVEAIQRKIADNLPRKDRTEDQKKLNEKEIKSQKADDEYEAFRFDQAEDDLVNDSEDDEDTAATTSSQAPITSKETSARTIRTLVAIVHVADAVHMGTILTIAEQQVAAKVANFLKPYTPRRNEPDEPPAKHILTVLPIAALSNVVSTILGMQDRVNKLTIETSNKWALPVKADGIYKIMIDAFDIPTNRQGEFITSGLQARTEKETVFKAFFQMDKIHRMMNRRHFFFRWRLVFVNEWTVRVVGTINRNIPHQVSAIQERRNNQRFVEPEITLTLSKAQLQERIDRTQASILSLEQQLKPIQKEIGALEKERMNHSISAHGRTNSTAYRKLKQTRQQIRSKPNTAIVLQEKLKQARRDRYVLNKAMRAVSKKGKGKEKSSASTSRSRKRKRKKQKHSSQATSSAKAKITEGYMPQMLSLVKPLFEKNSIPVCGVDPGTRITGVSTSTTSAWMIQRIQDFTSNTTTELRHDIYNTWSLRASAVNHHSRSNRHRLRRERAKNAEKEGTEADNRRIEREKRTREVFTHKAYHKYADIERMHFPPDMIFQKPVHFYGHWQPTNSRIRGHARRGLKRLRGVQRRKGLVVIVNEYNTSKTCHWCLKPLQLQKYRGKDGKVRKCNGAVCCVNPNCVTVVNGCNTMNRDGNASKNIALKRVSVIVSSDGSPIPVFSSQYSSNYKLAQQFASQPTPVRLLHGP

SEQ ID NO: 3781 - protein, 906 aa, Apophysomyces variabilis
MQFFVNSYIIEYSQREIPVYLYSQNFWYSIAQLEMNISVTNTNPHMPDNIYDFWNQFRERHPAIVFPRNNFTGYSDALSAACKTFRDTYTNDIVENFQQRVCGFIIHRLQMLVPDLSKSSASRITYDYLYKSIAGGEPAWSSCLENASFDLFLAIVNLRDFLIPLMPQTCTLEALSERPGVCIPVLRAILEMYEQEHQQSDDEESGNLLRLFSLAPQPSFHFRFVTINAKALRALVQVRNDTDDYEGNGEIFNQVFDLNKYDFRRSVAYYLRIMYEAKHHFSMNCGTFTNEICTDGFSVVFHFARGAKLNTVELELEDFITEDINRYYRVCGIDPGVPHLYTASYGAGEAEHEIRCCSSAEYYCMTGSPQRGQQLLKQKRHQGIDTIESNFPSAKTCNIRKYNGRVDYFFLHKDILFNFYGRNDRERRFRAHQGRQRAVEELANILIDGGRKYNHRKRKHRGGNRKKRKKNREQRRRHKKKNTGRILKRREARGEVLVMKIDEYLTSQICHKCKTKSLCNVVTEDGIKHHGIQDCKTCRTPWNRDINTSKNMFYIAQSIWNGHGRPDAFRRPTQITATNAGPERVVTPQQAFKFVIRSKLSTEETIVLDEKKTVEKTVEKPIEKPVETPVTETSPATKSSLSDASTVASEADDRKRKRSEKDSAVPLASKKIHNQLQKWNQKKAELKQVQTEETESELPEDDFADLSMMACLLCQRKFKTKQDLERHQELSELHKKNLRDPVSVGKAQMKKRYVKSKTEQAEDQMVEQNYRNRAAERRQAFGQPDKPVLSEPKYRSSGAPVGQIRPRTDVDTTMGLRHVEKVASVKTPLAEDNVGARMLKQMGWRRGEGLGKDGSGIVDPITAQQYAQGAGLGTAYAKRDISATAGSDSYKDRVKEMARRRFEEAP

SEQ ID NO: 3782 - protein, 613 aa, Clitarchus hookeri
MQACYYRRSYVQLAWDSKICRRRTMDKLVSNIVGTNHEKKTAVFFGDPLVSKTKFASGNNRPACAELLGAFKRNERCKVFETDEYLTTRSCSVCFDKIPIPPKHKTSEIKDPEKRQKNKTHEHRFQVFPNCKIVWNLDVNTARNIILVGLGIVYPHWNEEQSPDEFVCPAEFRPLHGLKYKQVWLPAGGKITSSPGDEIGALPAQWENTKFKGRFILVGENPMAGIWVRNPELDYILLEALSNMHHACLKLEMGGGSLTIVTSYFQPRDPLDRHLSQWDLIVQRAKEQVHYHWRGDEQVPDREKSIGCEYTRSPGDLLVVSPCYRIVSGRNRSDGACSRTYRDWIVSDELDSDHKMILFTIRWNGSKGNRPARPRFMTARASWPLFDKVLLGKVERYRHDHETMSTNERARSLVRVITDACKETIPQVSRKVPHHPWWDDELELLRRNVNRSRKQFMRVYEPEERLRAVQRYNILRGEYRRKIRKKRQQAWRELVTDRGNEDPWDLVYWMVTGKVQSSEELPALEHDGQLLQSFEENARHLMKVLLPDDDRIGETEYHQELRNTMEMEISTEDTAPFSLEELNLKVYRITTEEGTRSRRTDRGLGWLLARTRT

SEQ ID NO: 3783 - protein, 852 aa, Tetrabaena socialis
MPPKKGALSKDTLAQICAVHGLLPPLLPDEEDRATRQDYLGLALEHGLVSELEFTRSRAVEHVTLKRYLHSMVKDETFLTHLNDYVTQSSLIRAAGSKLANLFAVTAYEQGWLDDESTYEEDDDEAEAEAPKAPNAKTFIDKTLLDQTFIKYCMLPFKSALSQANALIDAVVPPHAGLAAVWQQHQDVLAPLYPAADDLRFINWDQALSDMAREYCGALKAHVVTHLPARVRSLFRARIEMELGGHFRKDPASGRSTLTTAGGEACFTSDAYAALLAGPKNSMRLPASVRHLVVELRDRCGLTGTCRLDKITKLTPRLFKLHIDLSREAVRRGEKGWSACPVISTSRTFAYIDERVAEQLLEANGKCMNGVRYEQRPESQARLSLLAWMFGTHKHAWEAANKDARRIHKANKSRKKRKQKSRCGYGRFPKREHTIKSVATDGVALCVILECPRTVQPYASSSFSSSSTTSTTSSSPTTASAFLASLRPAERRDLVKYSEDPGRANISQTLVEKFDGEESHGSGTQARLTRASYLKRTLQKRRQEEELLRKRENPLLRLGIDHLGNGGGCTWCTTDLADFRRILDRNLTVHDILAEEYVYGDWYARWKMLLWRRKRSVLAQYYSGLIRKNAAKGAPVVFGRGDGGFAATGRGEQSVPTSAVGKAILRCQGSLKTRNPKFLAQSLDEKRTTMCCHRCGHVLFDVQGDNGRPLRGVKECRQCWVHEGGAGVRYWCQMIRPAPGEGKVEGGGGGGGGGGGGHDHHGTLRLIPDDKGEVLRRLKLCVVSQSDIPGHTSRLLNRDVNATKNLMRILDALLRNEPRPQYLQQRPRQRAIPQPPPDPDAEMGDVDDVVAH

SEQ ID NO: 3784 - protein, 589 aa, Tetrabaena socialis
MTCGVFKEMRAGATGAKEAEQEALEELEFELLAAAASTTTVADDATITAVKMKLNSFCKDSPRLRSQIQALVLSMNRLLGEAYAFATFHILHLHDCGMYPAIDRNFFYRCLVAVSANNSRPATLGPELVNSRDVYHALRPLQGSGSQPVNTVGYAQVLADLSIVMATMAGNHLWENLEKRIFNYLKMKYPGQLMGDPLRKKVVEALVRKPLVCTADLFQLSPSVPPDSAAAERLRHARAVADELRVLLPLPSGDHYQTRAHLTIPLYIKMLQEIEEARAAAAAAAAAATNLTAGKTVRGRVXMMQEMVPLIASYRQPLSDAELARARATSGGTVVGVDPGVTDVATVATLEGETRRYSSARYYERSKINLSNHRTRKWNAETRERVEGLPSARTASVAEYADFVQRYLVVLPELLQHRAAKGYRNMRFLRYVHRQESIHEICEVIAPREGGLVVVGFGDWRGVGTTPIRRRCSGPLQDIKKHLQKQAHVRLVIIDEYLTSRGCHGCLNRLTNMRAAPHTHGPGKERVQGATTHVHKVLHCRPSSQAAARSCCGTTWNRDVNASKNILLLTMLRLKGYQRPPELSRGHQQ

SEQ ID NO: 3785 - protein, 475 aa, Tetrabaena socialis
MVNAIRSRVVAASRRVVLASIALNLLVREVFDRQPDATLDIRDETTLRQFMLGTASANKPDARVADIFLRNPGLLHEVSDRHLSDRNIYSAAAKKLGTNLRNHLVVNLRRVVNKALADVPNDAERVLMLYTLYGWKGGPRKKIKPPKKAKTSSSVAPTAEIAPEPPPLLSAPQLDFIREKDAEEAEEAADDGGNEEAPKAKSKPRPTPEQLSGSRVVVIDPGRTNIVYAVEVPPEAPPKIYRLTRSQYYQESGVVRGSQRAARWLRGVKEELAQLSAASPKGASLHLFQAFIATYLETCEVRWTEALKTRWAQQSLRLYGGKKRVLSRFFNEIARGQGGADSRPVVIAYGAAKFAPGGKGELSVPTSGVFKACQERFPTYLVDEFRTTKIHHVDDSLLQGVGERRWKGDNVKTVRGLLWCGSTNEKKSKFINRDFNGAMNIRRCFVSAERPAILDRSKCQGRLQFVRTGRVIRMK

SEQ ID NO: 3786 - protein, 579 aa, Tetrabaena socialis
MLQLHHHPPHIELXNIRQHFQQYVCRTAGVLLKPTICRSEDVRTFADLSKARKAYWRSQLRHAYEDILQHRHGVAMQSHATLQPTIKRFRTRLVPEQIVPGRSVDRDLNSTTRCYVYLGFMARMSRFLEALGQSKLPSPLPLKTSFIPAHYAIDTTSLCHLLFKGKTHLKEFSRYFEHKVPTGFPLPGLKNMANICSSLNELSGRPCTPKEEELFKDAIWTFLAHFKNRKTKQLNPLCGVGRDKHCSSLKFDHSISTDGYAVTLIVTGRELRGRKAYFSVTRDRREKSRMDPLESVPMDDHGYPLLTARTAQAVKEWLAAKHPGAGTPGGDPGKGVLLQMVDSATGRTLRYTAKQRAADTLSGMRHKKLQAARHKSLATVCGPLRAPGIHMSYPNVARIESNLLRKVSPRAASLGHFREYIAVRSSCRKHMEVAYGDWMVYRWARFLAWTRRQLSVARFAAKIKETFGKNGQPVIIMYGDWGRRPNLKNQAPTPGIGLRKQLAMLGILSVSVRETFTSSYCPRCAAGVEHGKGHYHLLHCTEQQCSKWYPRDVLGALNIQAKARFLIEHPGTPHPQFHS

SEQ ID NO: 3787 - protein, 750 aa, Prototheca cutis
MLSWNVEFWTDRMRLVSVVTLEYVLRKLEGGEAYTRHLNTHKRSSALGLPAASLEACWMGEDDAKDIAERTWNDLATGIRRKVHGTDDQARRRGQLIARIAPRALENALVQAAEKFGPGWEDVFADLVPVIRRCGADVPSPGTVQMSSDTDAAQVGAEPETLQMVPKMVVPHVPRTEAGPDQGEGAGQGAQQATSARSGRRRIGEWQGNGRLHWPAGKVERAMPPGLDMLSTHDPDGVVRLAYELLAIFKHCGDAGRPVQLPKADWCAIIRPIVLALMWISTEADKLRLLATVSKFMWQTRRWKQTFTVLPICRSSARHIILDARSLWLLCQQAGIEVGTRDAFAARGAESWRGLFNFPSTWFASDQCGRARMRKRFVGYATTDGVALSLALERGGSGSDGEQGGRVPWHVAKKARRRAAAKEAKQASWDAKQAAKKAQAATKKAKQKADREHAKKVLGGGXCSLGIDPGRKVILTCNYGEQKGDTVCMTTKEFRHNAHFNKNRDTHLRLLRENKDLWDVVENVPWLATGRAQDVRDHIDYMFQPFDGECTRFDALLDVTCSYKWRKAAFDVYMMRYMAMDKSIKDVIACTGHQPSRLVVFMGNASFRQNSPGHPPSLGWRRWAKRMREAHGLLVTEVDEFRTSQARAGVVVHICSACETHARLGGCKTARNQYAILKCQSCGVVWNRDVNAAGNIRHLGEALVLTGKRPPPFDRNTKLIPLACPLPRRSTWYDLITKILRWPWSAEQHH

SEQ ID NO: 3788 - protein, 711 aa, Prototheca cutis
MDRDFWALGREPPRDGITTVKGSVLVAWQRCHHAPLENFVLVVDHVSFHAWHFSRLVILEEYEAGRDVPRLIRREFFQEVFLWLTVCERRKPQTERTVDYRVTLARYWPKFLELFCYRAPVFQYAPTKIATYWGDARCRQLLSNVKVHFGEHVRGTVNLLLDMKGRRHEVLEQASAEQWDRQRRIEALRRLYDPVTRVKQALGRLEPAVEGLGPAHQAVYDEMLRVLRPAYWPGREFKKGTLYYDVKLHAREHVVAMIALSRFRDEQELRLFQALPLRRSHVPAAVEFDNQIVATHILGGYVLGQWSDNKTEIWERALRGWRREIQTVGGKLFSGHGSTNAVSCSYTKKPLGHAAARCVSRRFHAEGLKYVDGLGREELRQLPKTVVIDPGRRVLMSCMREDSKPGKGQRKTMGITAKQWRQWTQTYKVLGWINQRKTAKVRECERRLGEEAPNGHQSCTVAGYTRYLRALAQVRPTLAEFYKKPIFRKLRLWQYIRRQKADAKVVQRMRKFACGATLVIGDCSPPMARYHEPMPHFGLVRTLVKAGFSALLVDEYFTSQTCPGCRNRSLEKFKRVPNLRKRGKRACKNGRECKSERGCKNGRECKSERGCKNGRNGKKDRKRIKEKRKRVKERRKRDNAKLPTMLCHGLLRCTNCKLKDGRPRLWNRDVMACLNMIIIVQSLRETGKRPAEFQRPEGHRRSKKPLESPAS

SEQ ID NO: 3789 - protein, 417 aa, Prototheca cutis
MWISTEADKLRLLCEVSKFMWRTRRWKRTFTVLPVCRSSARHIILDARSLWLLCQQAGVEVGTGEAFRARGPESWQRLFDFPSTWPQRKPRRPRGKPSGRQTEHAKKVLGSGGCSLGIDPGRKVILTCNYGEQKGDTVCMTTKEFRHNAHFNKNRDTHLRLLRENKDLWDVVGNVPWLATGHAQDVRDHIDYMFQPFDGECTRFDALLDVTCSYKWRKAAFDVYMMRYMAMDESIKDVIACTGHQPSRIVVFMGNASFRHNSPGHPPSLGWRRWAKRMREAHGLLVIEVDEFRTSQARAGVVAHGWGPGWMGARRELGDQICSACEAHARLGGCSTARNKYAILKCDRCGVVWNRDVNAARNIRHLGERLVLTGKRPPPFDRKTKLAPPACPPPRRSTLYDFITKTLRWLWPAEQHH

SEQ ID NO: 3790 - protein, 253 aa, Prototheca cutis
MYCMHEDSSHKKGRRRTMRISSREWAFLTRSRKFRRLLRRLMTKGVRKALQRLAAEAPNGARACTVADFLAYLRVFGQVEATLSKHYSKPIFRKLRLWTYIYRQKAYAAVIARLRKFANGATLVVGDCSPGPARYHEPMPHXGXLRALVKAGFXVVLIDEFRTSKRCPACXHEECTVETFLRVPNPRPYRREQTPEVVCHGLLRCTNEKCRPPNGEHRLWNRDLMACLNMRHIVQSLRKTGKRPDRFQRPALQ

SEQ ID NO: 3791 - protein, 253 aa, Prototheca cutis
MYCMHEDSSHEKGRXLTMRISSREWTFLTRSRKFRRLCERLMTKGVRKALQRLAVEAPNGAKACTVADFLAYLRVFGQVEATLSKHYAKPIFRKLRLWAYIYRQKAYAAVIARLRKFANGATLVVGDCSPGPARYHEPMPHVGLPRALAKAGFKVVLIDEFRTSKRCPACEDEDCTVETFLRVPNPRPYRREQTPEVVCHGLLRCTNEKCRPPNGEHRLWNRDLMACLNMRHIVEHLRETGERPDRFQRPAPQ

SEQ ID NO: 3792 - protein, 444 aa, Prototheca cutis
MDEDCWGLGKEATRGTMSTVKSSVRETWQDEHHSPLEGLVMKTHHVTSYAALFARLLILQEFERGNVHRLPEMASDKFLAQVFFSLVVYRQNSANCSRDTLLMRLRLSAALPKFLQLTGYEPPSFRSPNRIAVYWAEGWCRSILTNIRLHLGEHLRGTVNLLLDIKARRXELLEKAKEXNWXADRRRETLDRELYEPVRRIKAGLGRLDPAVKDLDAAQQAVYDRLLALLRSAYRPEHRFKKGTLYYDAPNGHKACTVSAFSDYLRVFGQVEPTLTGYYARPIFRTLHLWSYSSRQRAYAALVAKLRAFANGATLVVGDCSPGAARYHEPTPSVGLLRVLVKAGFDILLIDEYCTSQFCPGCEKRSVKTFLDVPNPRPHRREKNPTVRCHGLLRCANCKVKDGRSRLWNRDLMACLNMLLIVQGLRETGKRPERFQRPKPKKSS

SEQ ID NO: 3793 - protein, 763 aa, Prototheca cutis
MSTVKGWVGAAWKEDCHKNLETVVRKTNHAGPYSVHFVRLVVLEQLELGNVGCIPELVSEKFFTEAFLSLVTYGQQKAKNEDIIRFRKLLAAYKPKFRELTLYQAPAFKNPNRIATYWGEAWCRATETNVRVHFGEHLRGTVNLLLDVRARRKELLEKGKEENWDGKKRRDVLHRELYGPGQRIKAGLGRLDPAVKDLDAAQQAAYDRLLALLRAAYRPEHRFKKGTLYYDVQASPREHVAAMIALSRLRAEENLPAFQAVPARASFVPGAVEMDNQAAAMNVLGWRRVPKATEQDAVWKNGLLLPKRREIKDAAGGRKHCGHVYTDGRSCCYVKKDPKQTGKGRHKRPECGGGGAKGGGKCGKGGNPAEPKRQKLPDGRCGNVSDDASKVGDSNDSNDSNDSNDSKGDAPERRSGGGEPKGLDSSAEREVAAGISARTNTGAEASTSGAPPPPSHPGAQPARRRRATNKRAGLEGLQYVEDVDPAVLRTLKLVFIDPNRRDLLFCLHEDSRSGRKHWKIMRFTSNEWAYWTRSRKLRRLRQALMTQEVRACERRLVMEAPNGHKACTVSAFSDYLRVFGQVEPTLTEFYAQPFFRDARFWAYRNRQKGYAALVAKLRDFAKGATLVVGDCSPGAARYHEPTPSVGLLRVLVKAGFDVLLIDEYCTSKFCPGCEERSVEPFLDVPNPRPYRRAQYPTVRCHGLLRCANCKVKDGQSRLWNRDLMACLNMLLIVQGLRETGKRPERFQRPNKGKNNKDNDEKKS

SEQ ID NO: 3794 - protein, 661 aa, Prototheca cutis
MDEDCWGLGKEATRGTMSXVKSSVRETWQDEHHSPLEGLXMKTHHVTSYAALFARLLILQEFERGNVHRLPEMASDKFLAQVFFSLVVYRQNSANCSRDTLLMRLRLSAALPKFLQLTGYEPPSFRSPNRIAVYWAEGWCRSILTNIRLHLGEHLRGTVNLLLDIKARRXELLEKAKEXNWXADRRRETLDRELYEPVRRIKAGLGRLDPAVKDLDAAQQAVYDRLLALLRSAYRPEHRFKKGTLYYDAVPVRASFVPGAVEMDNQAAAMNVLGWTGAPGSADQEEIWXEGLLKRGIREIKDLGDRQFCGHVYTDGRSCCFIKKRPSLTGKGRRKRPASAADGSNAAAADSGAANVGDALHAPGDAXXRKTRKRRQRRGMEGVRYVEDVPPEELRQLKLVFIDPNRRDMLFCMHEDSQPGKGKRRTMRFTANEWAFLXRSRKYRRVRREMKPPAVFACERRLVMEAPNGHKACTVSAFSDYLHVFGQVEPTLTRHYARPIFRTLRLWSYSSRQRAYAALVAKLRAFADGATLVVGDCSPGAARYHEPTPSVGLLRVLVKAGFDVLLIDEYCTSKFCPGCEERSVEPFLDVPNPRPYRRAQYPTVRCHGLLRCANCKVEDGRSRLWNRDLMACLNMLLIVQELRETGKRPERFQRPKPKKSS

SEQ ID NO: 3795 - protein, 212 aa, Prototheca cutis
MTKGVRKALRRLATEAPDGARACTVADFLAYLRVFGQVEATLSKHYAKPIFRKLRLWXYIYRQXAYAAVIARLRKFANGATLVVGDCSPGPARYHEPMPHVGLLRALVKAGFSVVLIDEFRTSKRCPACEHEECTVETFLRVPNPRPYRREQTPEVVCHGLLRCTNETCRPPNGEHRLWNRDLMACLNMRHIVEHLRKTGKRPERFQRPAPQ

SEQ ID NO: 3796 - protein, 789 aa, Prototheca cutis
MGEDDARGIAEHTWNDLATGIRRKVRGTDDLARRRGQLIARIAPRALENALVQAAEKVGPGWEDVFADLVPVIRRCGADVPSPGTVQMSSDTDAAQVAAEPETLQMVPKMVVPNVARAEAGPDQGEGAGQAAQQATSTRSGKKRIGEWRGDGHLRWPAGKVERAMPPRLDMLSTHDPDGVVHLAYELLAIFKRCGDKGRPVQLPKADWLLRENKDLWAVVGNVPWLATGRAQDVCDLIDYMFQPFDSERTRFDALLDVTCSYKWRKGAFDVHARRRAAVKEAKRASWDAKQAAKKAQAAVKKAKQKAYREHAKKVLGGGGCSLGIDPGRKVILTCNYGDGKDDTVCVTTKEYRHNAHFNKNRDTHMRLLRENKDLWAVVENVPWLATGRAQDVCDLIDYMFQPFDSERTRFDALLDVTCSYKWRKGAFDVHVMRYMAMDKSIKDVIACTGHQPSRIVVFMGNASFRHNSPGHPLSLGWRRWAKRMREAHGLLVIEVDEFRTSQARAGVVAHLVGNIPGEGMGAGQSKDNHAVGANGASELSTSEQSSCPVPESVRGKAVYNVYNQRIDGLPAPKIDILDPSNNMPAEPNQQPAPGQKKLLSTERVVSNIPKGNTEGTWVYPSPQMFYNALKRKGKGDDVTEDDMDSVILAHNSMNELTWGHVLVWESLHRSPCAKASSSQRRGTTPSCSPIARMRSWFGGQLPFDRHDWYIDRCGKEVRYVIDFYFHDELAGRPEAFELNVRPALDSFEAALDRAKMQIYTTFAKYGLPCPVTGHAGTIGVAAVEADKN

SEQ ID NO: 3797 - protein, 673 aa, Prototheca cutis
MGEGDARDIAERTWNDLVSGIRRKGRETDDQARRRGQLIAGIAPRALEKALVQAAEKFGPGWEDVFADLVPVIRRCGADVPSLGTVQTSPDMDASQVGAEPEALQMVPKMVVPNVARAEAGPDQRESARQGAQQATSARSGRRRIGEWQGNGRLRWPAGEVERAMPPRLDMLSARDPDGVVHLAYELLAIFKRCGDEGRPVQLPKADWCAIIRPIARALMWISTEADKLRLLATASEFMWRTRRWKQTFTVLPICRASARHIILDTQALWLLCQQAGTEVGTRDAFVAGGPESWRGLFDFPSTWFASDRCGRARRRKRVVGDATTDGVALSLALERGGSGSDGEQGGRVPWHVAKKARRRAAAKEAKQASWDAKQAAKKAQAATKKDKEVVDKAHAKKVLGGGGCSLGIDPGRKVILTCNYGDGKGDTVCVTTKEYRHNAHFNKNRDGHLRLLRENKDLWDVVGNVPWLATGRAQDVCDHIDYMFQPFDGERTRFDALLDVTCSYKWRKGAFXVYMMRXXAMDKSIKDVXACTGHQPSRLVVFMGNASFRHNSPGHPPSLGWRRWAKRMREAHGLLICSACKAHARLVGCSTARNKYAILKCHSCGVVWNRDVNAARNIRHLGERLVLTGERPPPFDRKSKLTPLACSPPGRSTLYDFITKILRWLWPAEQHH

SEQ ID NO: 3798 - protein, 529 aa, Prototheca cutis
MSILLIIFVLRQCSSGGVPELDIREIRRGLAYLCGNNGYRHQGEDPQXVQGEFAKFIARHFREHVRPEEGQCTLCNYNAQGYVTXLDRHIATHKPMAAKRHLAAALEACGMGPREAARIAAEAWKALKGAINEDTRGTIGEPAAWRIAAVVSDVVDRALRQIALAPGGQLDRIRGLPDGQADRLRALVAAMIDGASHVPVPMSDPASPPSSPGSAQVTPEPQTIRMMTNTGPAQTAPDQDAERRQDALEAEAAQPGGGAGRRWPQRPVVLDMPPRLDMLSRNDPDGAVILAYQLLEAFVQCRLAGRPVRLTKADWHRYMHTKLQKDHGLKSFLLGMPSLKTGREQGVVDYIDYLFRPYNIAYTFFEALLNVHCSYKWKKASFDVHIMRYKAMDAIIRRIIDHIVSATGVDPKNIVIVMGRANFRHNSPGHPPSFGWRHWTKRMREVHNLVVIEVDEFNTSQVCSNCLAASRLGNAPEARDNYAIRKCQNLDCGEEWNRDVNAARNIRYVALQILLTGVRPEPFNVSLPR

SEQ ID NO: 3799 - protein, 317 aa, Prototheca cutis
MFQQATAYERRQFYHAPNQDAKYWGEAQCAAVEANVLKHFGEHVRGTXNLILNVKDRRKELDARAHSSRQHDAESPEELEQLGKCVFIDPGRGDLMYCMHEDSSHKTGCRLTMQISSREWAFLTQSRKFRRLLRRLMTKXVRKALQRLAAEAPNGARACTVTDFLAYLRVFGQVEATLSKHYAKPIFRKLRLWTYIYRQKAYAAVIARLRKXANGAXLVVGDCSPGPARYHEPMPHVGLLRALXKAGFXVVLIDEFRTSKRCPACKHEXCTVETFLRVPNPRPYRREQTPEVVCHGLLRCTNEKVKIFISDAQQPPG

SEQ ID NO: 3800 - protein, 540 aa, Prototheca cutis
MFQQATADERQQFYHAPNQDAAYWGETQCAVVEANVRKHFGEHVRSTMNLILDVKDRRKEVDVRACREGWNRERRNETREGEVNGPARRIKEALGRLEAAVEGMDAAQQAKYDRLLQLLRNAYPPGYRFEEGTLYYDSKVNPREHVRAMIAMSRFRVEEGMRTFRAIPMHTSHVPGAVQMDNYIVAKQFLKDQKLANFSANLEFIWGTLLMPGRREIKDVSGNKFQGVSDGIDPPQQDRAGAQQPAARRRVVKRRGLEGLRYVDDLSPEELEQLGKCVFIDPGRGDLMYCMHEDSXHXKGXXLTMRISSREWAFLTRSRKFRRLLRRLMTKGVRKALQRLAAEAPNGARACTVXDFLAYLXVFGQVEATLSKHYAKPIFRKLRLWAYIYRQKAYAAVIAXLRKXANGXTLVVGDCSPGXARXHEPMPHVGLLRALVKAXFXVVLIDEFRTSKRCPACEHEECTVETFLRVPNPRPYRREQTPEVVCHGLLRCTNEKCRPPNGEHRLWNRDLMAXLNMRHIVEHLRKTGKRPERFQRPAPQ

SEQ ID NO: 3801 - protein, 917 aa, Prototheca cutis
MRFVSVVTLEYVLRKLEGGEVPAQLTKXEFRKALSYLCGKNHYGDEGPDNVNVAGELAKFIXKHYRSRVRPAEHQSRQCDLQAAQLYQAYTRHLDXHKRSSALGLLAASLEACGMGEGDGRDIAERTWCDLATGIRRRVRGTDDLARRRGQLIAKIAPRALEKALVQAAEKFGXGWEDVFADLVPVIRRCGXDVPSPGTVQMSSDTDAAQVGAEPETLRMVPKMVVPHVPRTEAGPDQGEGAGQAAQQATSARSGRRRIGEWQGNGRLHWPXGKVERAMPPRLDMLSTHDPDGVVHLAYELLAIFKRCGDEGRPVQLPKADWCAIIRPIASALMWISTEAHKLCLLATASEFMWRTRRWKQTFTVLPVCRASARHIILDTHALWLLCQQAGIEVGTRDAFRAGDPESWKRLFDFPSTWFASDRRGRARMRKRFVGYATTDGVALSLALERGGGASGGEQGGCVPWHVAKKARRRAAAKEAKQASWDVKQAAKKAQAATKKDKEVVDKAHAKKVLGGGGCSLGIDPGRKVILTCNYGEQKGDTVCMTTKEFRHNAHFNKNRDTHMRLLRENKDLWAVVENVPWLATGRAEDVCDHIDYMFQPFDGECTRFDALLDVTCSYKWKKAAFDVYMMRYMAMDKSIKDVIACTGHQPSRLVVFMGNASFRHNSPGHPPSLGWRRWAKRMREAHGLLVIEVDEFRTSQARAGVVAHVWICSACKAHARLGGCKTARNKYAKCDRCGVVWNRDVNAARNIRHLGERLVLTGKRPPPFDRKPELGAPLFAAHPPSPRRSTWADDGAALKTLHDANARFYNAFAKADLEAMGRLWAQSDRAQVLHPGCACITGYQPVMRSWEYVLSSGEMDIALKDVRLCIVDRVGWVTCLEVTKAEDHQGRVAATNIFLMDEQGDWKLTLHQGSIL

SEQ ID NO: 3802 - protein, 212 aa, Prototheca cutis
MTKGVRKALQRLAAEAPNGAKACTVADFLAYLRVFGQVEATLSKHYAKPIFRKLRLWAYIYRQKAYAAAIARLRKFANGATLVVGDCSPGPARYHEPMPHVGLLRALVKAGFNVVLIDEFRTSKRCPACEHEECTVETFLRVPNPRPYRREQTPDVVCHGLLRCTNEKCRPPNGEHRLWNRDLMACLNMRHIVEQLRKTGKRPDRFQRPAPQ

SEQ ID NO: 3803 - protein, 286 aa, Prototheca cutis
MPSTGGKTQCAAVEANVRKYFGNNVRGTMNLILNVKDRRKEQDRADTQQPAARRRVVRRRGLEGLRYVDDLSPEELEQLGKCVFIDPSRRDLMYCMHEDSSHGKGRRLTMRISSRDKHYAKPIFRKLRLWAYIYRQKAYAAVIARLRKFANGATLVVSDCSLGAARYHEPMPHVGLLQALVKAGFKVVLIDEFRTSKRCPACKHEECTVEMFLRVPNPHPYRREQTPTVVCHGLLHFTNEKCHPLKGEHSLWNRDLMACLNMRHIVEHLRKTGKRPLCFQCPKPQC

SEQ ID NO: 3804 - protein, 882 aa, Prototheca cutis
MARNFWGSGREAPRGAMTTAKASDCEVDGPRLLGRGREALKGVFTAAKASVLATWKRMFHGPQEQYVQKMHPVKQHASFFAALVLLEEDEAGSADFATRFVCPRFFAEVFLYMVSYSPRRKTRDDETTYFRARFQRSWPMFQQATAYERRQFYHAPNQDAKYWGEAQCAAVEANVRKHFGEHVRGTMNLILXVKDRRKEXDXRXRXEXWDRKKRNETREREVNGPARHIKEALGRLEATVEGMDATQQAKYDRLLQLLRNAYPPGYRFEKGTFYYDSKANPREHVRAMIAMSRFRVEEGMRTFRAIPMHTSHVPGAVQMDNYIVAKQFLKDSKLGSFAANLEFIWXTLLMPGRREIKDISGNKFQGVVSSDGISCSFIKKPPDAQQPAARRRVVKRRGLEGLRYVDDLSPEELEQLGKCVFIDPGRRDLMYCMHEDSSHEKGRRLTMRISSREWAFLTRSRKFRRLLRRLMTKGVRKAQQRLATEAPNGARACTVADFLAYLRVFGQVEATLSKHYAKPIFRKLRLWTYIYRQKAYAAVIARLRKFANGATLVVGDCSPGPARYHEPMPHSDGIDPPQQDHTDAQQPAARRRVVKRRGLEGLRYXDDLSPEELEQLGKCVFIDPGRXDLMYCMHEDSSHXKGRRLTMRISSREWAFLTRSRKFRRLLRRLMTKGVRKAQQRLATEAPNGARACTVADFLAYLRVFGQVEATLSKHYAKPIFRKLRLWTYIYRQKAYAAVIARLRKFANGATLVVGDCSPGPARYHEPMPHVGLLRALVKAGXNVVLIDEFRTSKRXPACEHEECTVETFLRVPNPRPYRREQTPEVVCHGLLRCTNEKCRPPNGEHRLWNRDLMACLNMRHIVEHLRKTGKRPDRFQRPAPQ

SEQ ID NO: 3805 - protein, 253 aa, Prototheca cutis
MYCMHEDSSHEKGRRLTMRISSREWAFLTRSRKFRRLLRRLMTKGVRKAQQRLATEAPNGARACTVADFLAYLRVFGQVEATLSKHYAKPIFRKLRLWTYIYRQKAYAAVIARLRKFANGATLVVGDCSPGPARYHEPMPHVGLLRALVKAGFSVVLIDEFRTSKRCPACEHEECTVETFLRVPNPRPYRREQTPEVVCHGLLRCTNEKCRPPNGEHRLWNRDLMACLNMRHIVEHLRKTGKRPERFQRPAPQ

SEQ ID NO: 3806 - protein, 709 aa, Prototheca cutis
MTDPDWLGLGQRKGSMTTVKASVLATWNPDLHDPLDEFVKKXHRVAKYASLFARFVFIVEYESGNVGVVRELACKGFFAEAFLWLISYDRQERTSLKTGEFRSHLERHWPAFLRLTGYERQPFKNAYTVARYWGEARCRDVLTNIXQHFGEHIRGTXNLFLRXKARRRELNTRADAEGWDRQARHDAXERELYGPARRIKTGLGRLDPTVDGLNATEQAVYDRLLQPLRAAYRPEHRFKXGHFYYDCKANPREHLCAMIALSCTRGSTGKRKFQALPVQMSNVPAAVEMDNLGVAKNILRCGKVLTSADQDAIWADLLQPGRREIKDVGGKTFHGHVYTDAASCCFVKKPPGLTGRGRQKRRSGDGDGGAGGAMRRVEEEPTGSSADFGEAPGAGASTSAGAGPPAVGAPLRGRPSAQRSGKRPGGITAHAGLEGLRYVDDLTPAELQQXKFVFIDPGRRDLLYCMHEDSTPEKGQRRTMRLTCNEWAFLTRSRKFRKLRERLRTXTVHDCEQRLAVGAPDGYKDCTVAAFSNYLQVFSEVEPTLTEFYXQAIFRKLRFWAHMYRQKAYAALIRRLREFADGATLVLGSSVPAVGRFHEPXPGIALVRALVKAGFEVLLINEHCTSKMCPDCEQRSVETFHRVXNPRPYRRAQQPTQLCHGLLRCTSGRCRRADGSYRLWNRDLMACLNMRLIVQSLRETGERPLRFRR

SEQ ID NO: 3807 - protein, 665 aa, Prototheca cutis
MWISTEADKLRLLCEVSKFMWRTRRWKRTFTVLPVCRSSARHIILDARSLWLLCQQAGIEVGTRNAFRARGPESWRGLFDFPSTWFASDRCGRARMRKRXVGXATTDGVALSLVLERGGSGSDGEQGDRIPWHVAKKARRRAAAKEAKQVLWDAKQAAKKAQAAVKKAKQKAYREHAKKVLGGGGCSLGIDPGRKVILTCNYGDGKDDTVCVTTKEYRHNAHFNKNRAGHLRLLRENKDLWDVVENXPWLATGRAQDVCDHIDYMFQPFDSEHTRFDGLLDVTCSYKWRKGAFDVHMMRYMAMDESIKXVIACTGHQPSRLVVFMGNASFRHNSPGHPPSLGWRRWAKRMREAHGLLVIEVDEFRTSQARAGVVASSKPHQGSRDQHIVFTTSDDGKSCGKTWQAHRVIQWGLTPLWSPALYWDTPRARLLLFYSESRKALTPGGDVKCMASTDLGASWSPPTLVWTHEASEECPKVTAAPPVVDAEGTWYLPVHLEPYGAFRTFNKTSHSELAAGEEDMPRTPPPTNATPQSLLVAADGRLLALFRTALGSVHRALGSRQAAEWTKPVATPLQNPNSKLATVCIEDQILAVHNPGKKDRSALAISLSTSAGAKWSHVADLDAQSQGTLSSPSMLVWSDDTVKVVYSVLGVGLRLLTAQLPVEHS

SEQ ID NO: 3808 - protein, 497 aa, Prototheca cutis
MRXKAEPAKRRRGLDGNAVPVPNSPHGHVTEAALGQAKKHEMHSEEEPAKRQRGSDGDGVPVPNSPREHVDEATPAWDTGDGQAGAGQPESRGAQNAPVREVILRPPPWPEVLTVHDPEGAARTAYDMLCRLAERHAVGVNVHLSADEQRELLRPIVEAIAGLTSQEDRLRFIYADALFRRDTGRPTFTLLPMCKWSARHIPLDANILYYVSKAAGKDVGTVEEFRPRYMEHVEATFDLSRVRLSLGADNSRSGRKHATGFMTTDGESLGITAERTTPHDGASTSSGEPTGDVAEASRRWRHGKGCLVGIDPGRTQVLTWAVGMDGPTGRMSGREHRHDTHAEKCCTHHEDLLRTNNLADFVHEVPSLKAAREEDVRAYFDYMSDERLDELLRVTCSRSWKKSTFDVYMMKYKMMDEIIERIIKDTGRLPREIIIVLGAADFGNHAPGHEMWAWRMRQHGLAVINVDEYNTSQVRWGRQVTPMHTQGPACWRFAAHQ

SEQ ID NO: 3809 - protein, 790 aa, Prototheca cutis
MGCYYAAFTRVLNEKVELHTGNMHLVSLFALLFTLIHFREVDLAELTSSEIYYALLYMFGQNKYGDEGPDNENVRGKLAKFIAGNYRWVVRPKPHQLQDCLYAARRYMADANKHIKDHKPLAAKAEMAAAMNACGMLQVHAARIAAKTWNAIGDMIRRNREAERGAQAGPPPGVGGLGDADADEDDRDEDPPARYRHIRPFDSQALERMIRQIASALGQDWAGIVPGLAQAIRGCGMYVPSPVTAPMTLNELPARVGAAEAEAVAMLPAERPAQNPPNQGTGSGQVAVRVPAAAQPGRRSRRRGGNRRRGWSGDWWGAPPPRGPVEMTMPPRLDMLVAGDSSGAVRLAYELREAFEKCKEAGRPVALSEADWCEVSRPIAEAVMWLSSQRDKLRLLCEVSKFLWETRRFKQAFTALPVCKWSARHITIDTKILWYTCREAGIPVGPLPGFHAQGVDAWRRVLKLDDGWCEPGDYRPGRTNRRFRRFAKTDGVSLCLLFDVLRPADGQEAGGGTQPAVAGLSEAVREAAKRRLLSGGSILGMDPGRKETWTYNVDDVVGQDGALSTRQFGHEAHYGNHRFTHIKLLRDNGLWQFACRVPSLMTGLAQGVRDYIAYIFRPFDGDRSCFQALLDVTCSTEWKRAAFDVHMNRYRAMDAAIKRMVDHTGLTPRQLVVAIGNANFRHNSRGHPPTIGWRRWAKRMRDIHGLLVIPVNEYNTSQVCSACNAALRLGDCPTATNKHFVRKCQNEACGVVLNRDKNAARNICYVAMGLIFNRVRPEPFDKRLPPLTRA

SEQ ID NO: 3810 - protein, 1451 aa, Prototheca cutis
MHESEVAESPRHDDGEHSGHDAQEAPRSAGRVDDPDTFLPPKLTKKKLEKLQEQYNKRGIVYMSRLPPHLKPRKLRQMLEPYGEIGRIYLAPEDARQRRLRKEKGSNSGKNFTEGWIEFEDKKDAKKTVAMLNGQLMGGKRRSSYYYDLWSLRYLPKFKWDQLTEEINYQKAVREQRLAMEVAAAKRERDFYLQQVDAAKAQTAMQERRQKKARARGCMDIDAKLAAEDVTGAVSKDRSSEVEEQPEKKVRKFGQRKAKADPVSAPEAPTVSQPLRPFTQNRSVYRTAGRALERRCLAPGSPDTVEAVVADSLDEDAEAQTPRLLGFTFQDVYYYLNIGYWSLLLLSVLTGNDFLSRIAQFETYTTTMFVASAVFSTFFGLKWWRDARRKLQAEKTNDWRALLRYAWNALFWLGFVLWYAVPPVNAVTEYAGTAGSIACVYGAALTLSSALMVGVYSFLGEPQLPRKLVMIGPYSIVRHPQILGNFLFIMGFSLAGGAVAATAAFLLSFAVYRITVVPREEKLMEDKYGAVYRRYMERVPAFRWGWVILGVVEGRWESRLSSPASSSLEGDAEEAASLLHTVIRLRRDAPQSTIPDALCQAFIKHYGQQDHVARVALLRRLATEFGGPSDDITAAMRRYDQALAQPGGIAALVAMRADSLRALRECPSRSGALRALAEALRGQLFALFGPGLLRVERLSWEGSPTALLERVMAAEAVHRIASWDELRARLGPRRRVFALTHPGLPADQPPSNPAVAVFYSISNSQPGLAGIDMGNFLIKKARGGLALDPVAGFHVRNGAECWRLNWRADASPAGLARSHGIMVNYLYDLPHVDANNRAYVVSGAIPASEQQDCEVDGPRLLGRGWEALKGVFTAAKASVLATWKRMFHGPQEQYVHKMHPVKQHASFFAALVLLEEDEAGSADFATRFVCPRFFSEAFLYMVSYHRLKTRNPETTFFRARFERSWPMFQQATAYERRQFYHAPNQDALYWGETQCAAVEANVRKHFGEHVRGTMNLILNVKDRRKELDARARREHWDRKRRGETCDQEVNGPARRIKEALGRLEAXVEGMDATQQAKYDRLLQLLRNAYPPGYRFEKGTFYYDSKVNPREHVRAMIAMSRFRVEEGMRTFRAIPMHTSHSDGIDAPQQDRAGAQQPAAQHRVVKXRGLEGLRYVDDLSPEEXEQLGKCVFIDPGRGDLMYCMHEDSSHKKGCRLTMRISSREWAFLTRSRKFRRLCERLMTKGVRKALQRLATEAPNGAKACTVADFLAYLRVFGQVEATLSKHYAKPIFRKLRLWAYIYRQKAYAAVIAXLRKXANGATLVVGDCSPGXARXHEPMPHVGLXRALAKAGFKVVLIDEFRTSKRCPACEDEDCTVETFLRVPNPRPYRREQTPEVLCHGLLRCTNKECRPPKGEHRLWNRDLMACLNMRHIVQTLRKTGERPDRFQRPAPQ

SEQ ID NO: 3811 - protein, 760 aa, Prototheca cutis
MIAVICSFVLHATRIWLLLGAIANAFVVRVFAAVGGSLPNLEHNQYRRLLSYLDGHNHYDPSAVDADRVNGELAQFCFANFKGRVRQVTDLSKVNSYLAFDYERAVNRHIWDHFLMSSRSFSRALLEAGGMVSRDAARDMVWQVIPEQTVASGQAGAGPSQERHDPATGAHLPWPSVRASSNTGPAAQAALGRAKKREMHSEEEPAKRQRGPDGDDVLVPSSPRGHVTEAALRRGTKREMRSEEPAKRRRGLDGNAVPVPNSPRERVAEAALGWDAGDEQAGTGRPESSGPQCESVHEVTLRPPPWPEVLTAHDPDGAARTAYDMLCRLAERHAVGVDVDLSVDEQRELLRPIVEAVAGLTSQEDRLRFNYAGALFRRDTGRPTFTLLPMCKWSARHIPLDATILYYISKTAGKDIGTVQEFLARYMEHVEATFDLFRVRLSLGADNSRSGRKHATGFMTTDGESLGITAERTTTLTPPAPGPAAARGDDGASTHDGASTSSEELTGDVAEARRRWRHGKGCLVGIDPGRAYVLTWAVGMDGPTGRMSGREYRHDTHSEKCRIHHEYLLRTNNLADFVHDVPSLKAAREEDVRAYFDYMSDERLDELLRVTCSRSWKKSDFDVYMMKYKMMDEVIERIIKDTGRLPREIIIVLGAADFGNHAPGHEMWAWRMRQHGLAVINVDEYNTSQFCSVCRRPPRLVDSKTARCPYHFRHCLNCHVDRDRDVNAARNIWYVAMCLLTTNARPYPFRKPLDSEHRED

SEQ ID NO: 3812 - protein, 1614 aa, Prototheca cutis
MLSWNVKFWTGHMRLVSVIAIAYVLRKLEGGEVPAQLTKEEFRKALSYLCGKNHYGDEGPDNVNVAGELAKFIAKRYRSRVSAEPKTLQMVPKMVVPDVACAEAGSDQGEGAGQAAQQATSARSGRRRIGEWQGNXHSRWPAGEVERAMPRRLDMLSTHDPDGVVCLAYELLAIFKRCGDAGRPVQLPKADWCAIVRPIVSALMWISTEADKLRLLCEVSKFMWRTRRWKRTFTVLPVCRASARHIILDARSLWSICQQAGIKVGTQKAFRTILTCNYGDGKGDTVCVXTKEYRHNAHFNKNRDTHMRLLRENKDLWAVVGNVPWLATGRAQDVRDHIDYMFQPFDGERTRFDALLDVTCSYKWRKAAFDVHMMRYMAMDESIKDVIACTGHQPSRIVVFMGNASFRHNLPGHPPSLGWRRWAKRMREAHGLLICSACEAHARLGGCSTARNTYAILECQSCGVVWNRDVNAACNIRHGDAAMEALQSHDNPFLATTMLLLAEKNKGPESAFYPHIQSMPTTHNCLFSWTEDEFAHLRNTDIDPELPGAARGMFEAAEELGTQFPTVWPGLSYEMFCWAAGMVQSRTFHLRASNWVTNEETEGSDLYMLPGIDMVNHTSHPEKLSVDLEFVPDVRLGGRVVKPGHFAMVTTKEVARGDELLYSYGELSDAELLQTYGFVEREVHPSATASVTIQELVAGCLGSAAMSEREQDRAERALEAIERRLAPAGLFELALAGELPPRALLLAAQALLAREPDLDRQIQNLLLWDPSDPESPPPFPAPPTAEHLSAIVPAVRAARARLERAATDTAAAAAASMEDSLQQRATLAAALCRAQARVLAQAERALAMAALAAEGSEAGFPGKPVVLVALQWTRLSNVAGTRASVLSTPDITSHSLNISRGWPPLLTNGMALGEEAAGERYAGSARCAEAGTTGGAAMTSLPGSLSPRATLSEQPSLCSEVEAEPSGEPLSCSAGFVDDFGVSCAKGRPAGAGNASVAPTPRAFFPSDPAAYLGAAATGSEWDDEAAAVSYGGDADYDWEQAEAGDNCGDDDEDDEGPGSFGYCTNCTAPLWSDVCPDCGYALGLTPALFDPGHGPDSCSGMTLAEAVAXRAXCPATSTPPVVVAYDEAMXLHEEPGPPSSGVHPERPDRIRAAWARLCSSQLTGRCVRLPSRAATDEELERVHSRALVSGIQDLSSWHAARAKQAGAGAEKGGLGEGPSGASSDGSSGALDLSQARDTTAESHDNAADVDAATAPPPVTPSPPMRLPSDTYACAATAAAARLGAGAAADVASAVARGEARAGMAIVRPPGHHAESGSAQGFCFFNNAAVAARAAQAAGAARVLVLDWDVHHGNGTQEVFWRDGSVLYVSLHRHEGGSFYPGTGAAREVGEGPGLGSTVNIAWPCSGLTDAEYEAAAATIILPIAAEFAPDLIVLSAGFDAAAGDPIGGCHLTPGLYARLTRLMASVAPCAAVLXGGYNLAAVAACTEACVRALMGEHSCAGGGLVPGMGVAAGANVPGFGGFGEASTAMPTLPGSAKLSLGRCDHDNRHFNDTRSIPTWHPATPAVQRHKARVVRHEIWRAIAETAAAHAPYWACMAGLDAVLLRGAQPWTGR

SEQ ID NO: 3813 - protein, 364 aa, Prototheca cutis
MFQQATAYERRQFYHAPNQDAKYWGETQCAAVEANVRKHFGNNVRGTMNLILNVKDXRKELDHTDAQQPAARRRVGKRRGLEGLRYVDDLSPEELEQLGKCVFIDPGRGDLMYCMHEDSXHKXGCRLTMRISSREWAFLTRSRKFRRLCERLMTKGVRKALQRLATEAPNGARACTVADFLAYLCVFGQVEAALSKHYAKPIFRKLRLWAYTYRQKAYAAVIARLRKFANGATLVVGDCSPGSARFHEPMPHVGLLRXLVKAGFNVVLIDEFRTSKRCPACXHEECTVETFLRVPNPXPYRREQSPEVVCHGLLRCTNEKCXPXNGEHRLWNRDLMACLNMRHIVQSLRKTGKRPDRFQRPAPQ

SEQ ID NO: 3814 - protein, 687 aa, Prototheca cutis
MDRDFWGRGREALKGVFRAAKASVLATWKHMFHRPQEQYVQKMHPVKQHASHFAALVLLEEDEAGTADFATRFICPRFFSEAFLYMVSYHRRKTSNDETTYFRARFXRSWPMFQQATAYERRQFYHAPNQCAAVEANVRKHFGEHVRGTMNLILXVKDRRKEXDXRXRXEXWDRKKRNETREREVNGPARHIKEALGRLEAXVEGMDAXQQAKYDRLLQLLRNAYPPGYRFEKGTFYYDSKANPREHVRAMIAMSRFRVEEGMRTFRAIPMHTSHVPGAVQMDNYIVAKQFLKDSKLGSFAANLEFIWGTLLMPGRREIKDXSGNKFQGVDNSNDNEDGGGSTRAARVEAEGATGSRVVRGRAASITAGTAASAESDGIDPPQQDRAGAQQPAARRGVVKRRGLEGLRYVDDLSPEELERLGKCVFIDPGRGDLMYCMHEDSXHXXXXRLTMRISSREWAFLTRSRKFRRLLRRLMTKXVRKALQRLAAEAPNGARACTVADFLAYLRVFGQVEATLSKHYAKPIFRKLRLWXYIYRQKAYAAVIARLRKFANGATLVVGDCSPGPARFHEPMPHVGLLRALXKAGFKVVLIDEFRTSKRCPACEDEECTVETFLRVPNPRPYRREQTPEVVCHGLLRCTNEKCRPPNGEHRLWNRDLMACLNMRHIVEHLRKTGKRPDRFQRPAXQ

SEQ ID NO: 3815 - protein, 423 aa, Prototheca cutis
MVFWTNRRTKSTSAREFPFWKAALSRASWHSNGPPTEGAEGCQVLGEAQCAAVEANVRKHFGEHVRGTMNLILNVKDRRKEVDARARRERWDRERRNETCDQEVNGPARRIKEALGRLEAAVEGMDTAQQAKYDRLLQLLRSAYPPGYRFEMGTFYYDSKVNPREHVRAMIAMSRFRVEEGMRTFRAIPMHTSHVPGAVQMDNSIVAKQFLKDSKLGRFSANLEEIWGTLLMPGRREIKDVSGNKFQGVHYAKPIFRKLRLWAYIYRQKAYAAVIARLRKFANGATLVVGDCSPGPARFHEPMPHVGLLRALVKAGXNVVLIDEFRTSKRCPACEHEDCTVETFLRVPNPRPYRREQTPDVVCHGLLRCTNEKPAPEWRASSLEQRLDGVPEHEAHRGAPAEDRQAAGPLPAPKVAVKSILEE

SEQ ID NO: 3816 - protein, 380 aa, Periplaneta americana
MERLKAYKFRIYPSEEQEIFFAKSFGCVRKVYNLMLDDRMKAYEETKKDSSKKMSFPTPAKYKKEFPFLKEVDSLALANAQLNLDKAYKNFFRDKSVGFPRFKSKKNPVQSYTTNNQNGTVALIDNKFIKVPKLKSLIRIKLHRQPKGIIKSATISYHASGKYYVSLLCKEEMVELPKTNSAIGIDLGITDFAILSDGQKIDNHKFTSKMEKTLKREQRKLSRRALLAKQKGINLFEAKNYQKQKRKVARLHEKVRNQRTDFLNKLSTEIIKNHDIICIEDLNTKGMLRNHKLAKSISDVSWSSFVTKLQYKADWYGRKIIKIDKWFPSSQICSECGHKDGKKSLEIREWTCPICHTHHDRDINASINILTEGLRTQALA

SEQ ID NO: 3817 - protein, 1200 aa, Eudorina sp.
MDDSQQQTTTKRKRPDFAKKLQERKTSTETVVKCSLRSVLIGSSQERDRAVQAIDQRVVAYSQRVVLGTRALNLLVRSLFDGGVASDAIEGLTLDIDFTDQTFLRQLLLGTGNVHPRLVALFGAHPNLLYDKDCRHTSDRNIYSDASRALGTNISNHLKGNLVKVVKQAVYQCAPGSQEQHVEMLFRICCGWTRTPGHKKKKPAAKQPSKRSKQADAAAAAPATAEAALELSEEQLAFVRACRGILGLSDDGTLNNKWLDCKRNLPHMLKFFVHTLRLLEARAAAAPAAAPATPLFNLLPMCSRKRHFITIDTSSLHGVARDAGRVSASCTMDAFCANGSSHWGSILRVDKERLPSSSASPPTTIAATNCRVVGIDLGRTNILFAAEELPDGRTRTWRLTRAQYYRESGISAANLQTQRWHAVGSIRDALDALSKVSSKGSSVESFTAFLAVDLAVGWVVMAEHLKRRWAQQRFRLHGGKKRMVDRFFNRLERAGDGRLLVVAYGACKVAPGGRGEVSVPTGRMYRECARRHPTYLVDEFLSTCMYHADDSIVLDKVAVKKITKEGKEVTVAVDDGVRVFFAHGGFRGDQGRAVATAAAESVLTDMGYFVGPTKVNCDSQSAIKVIKNPVVSAKSKHIAVRYHLVREQVLCGSVVMVDCRTEEMVADIFTKPLGTEKFEEAVDATKIDRILDSTAMSRLRNDPVSSDDWHKYRSTLDLVRLLEELESASKSLLQQPEMLELKMYFHTRYTQDNKISIEADTGPHAGPAAGPMGSVGRIGPVDLSGNSTASILALYLQTCERRCIEAVIEAATIHDDRVLGSIIHDGIHVVRQEGEPVLAPARLRRWETHVAAKTGLHIELATKPFELDPEWLAPAMQPGVNIWDDRWLGDGDIMISYNEMKELWERRSFKVVKAAIFVRKEVDSHDVASERHLIESYKHVHYTEIRGDHSNVTVHKHSFIAKWLVDPNIRRYEKIALIPPPLRVPVGTYNLWSGFTVEKYTPSPDRPVNTDSDAVRAYLSLFDMLCLHDTETYNYVLNWIAQMFQLPARKIGKCIVLKGEEGVGKNRATDLLSLMLGPRDLFLQTADPATKLYGRFNLPRAGKLLIVINEPSGGDSFPAINAIKDMPDHHLTSSSNVSGVRIGSCSRRTSPKWLGPGSMPEEQDSGSRAAVKDAAQQEFHDSTVDRSSTWLHVAAEAVEA

SEQ ID NO: 3818 - protein, 1405 aa, Rhizopus azygosporus
MSEAEKANEKQIKKVAKKAMKKNDSAPDSSVKRRTSCHMEGPSSARSPLCPNKKVSKEDQVKAIIGEYTSVTRKIKLETILLPKHRDLTATFIEVSEQIRIIVVRSQISLVVGKRVTNSSTLSEDVIIRWDEFSQTYDIKKILPNHNMAEGRKIAEEYCYGKVCGLSSTWHELNRSVSDEDKALIDDACHKLTEVDVPKPVTLDKLGASPGSYFPMLKCILASYEEEHYKAKQNQEIKPDVPRLFALTPSPSFKFRSVPITPTTPKAFTSEFKKLQRTFRDNQNMFFRILDLAKLKLKNINELDTNTEHRKEVFSNFIGTDGYSADIVIYKKKRISEGSHDMAYDMNDLHVAITENQYDLETFCLTGLDPGGSSVFTAAHGGDNGTYQVRRCTRKEYNTYSDSTRIANQEAKRAEQERMTEVLNILSNLAKYFAFYKSGTARTRFYLYQGRQRALEEMANILVDDERGEKKCWAPSAFKHDTDKLPIIAFGNGMKGKDAAKIKGQQVGITGVLYDKLKQRQKEGRLLVTYIDEFNTLKNKSIGTVKALYDYQAQSSEELSFKIDDVMTLYYKDDPDWYFAATEDDQFGLIPRNYTEELTSPKETGTSIDTPACEPKWAIALYKFDPQDKEETQLDENEQILVTDYVSSSDWWTIEHKDGKSGIVPATYVKFQDEYEAELKKQEMNARKEQEQLQQSARMKAEEEERERSRQEEAERRRKMQEEARQKEEEKRRQEALMAARSMSTSSESASPRRSQIPAPPPPISATQVSKQAVVPFDPSKPDPTKTRWWTDRTGAFKVEAQLVACSNGKIRLFKTNGVKIDVPLEKMCFDDLKYVEQETGQKLVEDKTDNIPLAHLSRKFSWLEYFKKMNMPHDASNQYAKAFERERLGEKDIEYLTYGKMRSLGMSEKHIRRLQKFIETNRAEPLSDDESTRPKIKVKKSVTFGSVSIIEDHAVIEISDDEDEYNDHNEYVQKQIEQDERLARMLQEQENQQQTNAHISAPSVTLHRRGTGRPTPSHSAPKGVNPDAFTSNQFKPETLKPTPAPPPMRPLQPSPVQHTAPLPLGQPSHTPPNTVIAVNKSGFEDDAWTPRSSHSPSIQTSVFTSNNVSNSPSINSAAPQLPARSRPTPQISQQSSVDPQLLAKWGGSPSLAAANQQPVPPIPSAPNNSSTVGFNQANSFGHQNSLQPFQQQQQQQARLSPIMTANNSFTGTSPSMQHQQPTQFASQFSTLPQHSNTHTMHVTPLQPALQPPLVPQPTISPVSSYNMNPVQPQMTASSTMTSSTASSRTWANATPDNPFGTKPANHNAPLIHSHSAPILVDNSFQQQSFNTPGYSSNAIDPTDKYSIFKTIDTNAPSILKPAGPFQQQQQPQSQHQPSFVQMQAQQYNSMFMNPQQQQQQQQRW

SEQ ID NO: 3819 - protein, 536 aa, Diversispora epigaea
MTSQLKHCDDGPTPEELLLSGHLVENDSIQLLTYKKSLEITNRHKSRKRPRSVTPESVQNINETTLNDKSQIFDNTTQNTKSSVISDRDLTGNAGGLLPFWNEYTQKESKKWTDCVDLDPSLWNGSLRKMGLGSWYSVRMSVLKVVKPENLRKTYSQLSRYLWQDIMECVPPPIVEEDEKLPKPKKNKSSKIPAGKTQRIRLFPTQEEKSKLKCWMGTVRWTYNRCLVAVEKEGIERTKKALRAQCLNAANFNNTELQWVLETPYDIRDEAMNDLLKSYSSNFAAKRKKFKMKFCSKKDQQQSIAILSKHWGKSKGVYTFLCKMKSAENLPAELHYDSRLVMNRLGEFYLCIPQPLEIWAENQGPTQSDAVIALDPGVRTFITGYDPSGQAVEWGKNDISRIYRLSHIYDKIQSTHDSIHGKVRKRKRYKLRRVMLRIHKKICCLINDCHHKLAKWLCQSYRIILLPKFQTQGMVRRGKRRIRSKTARMMLTWFHFRCRRSTFLHPTYGSFKEFIVLPVRYKTFSLVNTLFLEGTS

SEQ ID NO: 3820 - protein, 604 aa, Diversispora epigaea
MECVPPPIVEEDEKLPKPKKNKSSKIPAGKTQRIRLFPTQEEKSKLKRWMGTARWTYNRCLVAVKKESIERTKKALRAQCLNAANFNNTELQWVLETPYDIRDEAMNDLLKSYSSNFAAKRKKFKMKFRSKKDQQQSIAILSKHWGKSKGVYTFLCKMKSAENLPAELHYDSRLVMNRLGEFYLYIPQPLEIWAENQGPTQSDAVIALDPGVRTFITGYDPSGQAVEWGKNDISRIYRLSHIYDKIQSTHDSIHGKVHKRKRYKLRRVMLRIHKKICCLINDCHHKLAKWLCQSYRIILLPKFQTQGMVRRGKRRIRSKTARMMLTWSHFRFRQYLLHKVREYPWCRVIICTEEYTXIPQPLEIWAENQGPTQSDAVIALDPGVRTFITGYDPSGQAVEWGKNDISRIYRLSHIYDKIQSTHDSIHGKVHKRKRYKLRRVMLRIHKKICCLINDCHHKLAKWLCQSYRIILLPKFQTQGMVRRGKRRIRSKTARMMLTWSHFRFRQYLLHKVREYPWCRVIICTEEYTNKTCGCCGHIHRKLGGSKVFRCPSCTAELDRDINGARNILLRYLTVISKEPVYAGAGTYPWDLHDPCRTRIFPYWA

SEQ ID NO: 3821 - protein, 278 aa, Diversispora epigaea
MRLSQGIRRINVNIMFFILDRQTITIRAQYCREPFRFYIRLLHNKELLAVDPNHPHHKMKLPFHHEHRRHNHVYPREPSGRNSRCSHRSGVRTFLTWYSPTVGHGNIGDNDINRVFHLCFALDAFISRTRALAKKHNSFKHAQARMRRHIQNLVDEVHKKTALWLTKTFDIIVLPKFNSVQMSHKQKRKINCKTIRKMMSWAHARFRNRLLSKAEEFGKIIITSVSEAYTSKTCSRCGYIKRNLGGNKVFRCDGCGLQINRDLNGARGIFPGHCLMEP

SEQ ID NO: 3822 - protein, 485 aa, Diversispora epigaea
MLDPLSAFXTYDVSVETLRRWADSGRIAIVRTPGGKRLYSITNIQEIFRDNQQTQITQKAKICYAKVSSEHQRDDLERQIANLRQYYPEYEIISDIGSGLNWKRRGTDCADLDPSLWNGSLRKMGLSSWYSVRISVLKVVKPENLRKTYSQSSRYLWQDIMECVPPPIVEEDEKLPKPKKNKSSKIPAGKTQRIRLFPTQEEKSKLKRWMGTARWTYNRCLVAVEKEGIERTKKALRAQCLNAANFNNTELQWVLETPYDIRNEAINDLLKSYSSNFAAKRKKFKMKFRFKKDQQQSIAILSKHWDKSKGVYTFLCKIKSAENLPAELHYDSRLVMNQLGEFYLCIPQPLEIWAENQGPIQSDAVIALDPGGMVRRGKRRIRSKTARMMLTWSHFRFRQYLLHKVREYPWCRVIICTEEYTSKTCGCCGHIHRKLGGSKVFRCPSCTAELDRNINGARNILLRYLTVTSKEPVYAGAGTYPLGPS

SEQ ID NO: 3823 - protein, 581 aa, Diversispora epigaea
MTSQLKHCDDGPTPEELLLSGHLVENDSIQLLTYKKSLEITNRHKSRKRPRSVTPESVQNINETTLNDKSQIFNNTTQNTKSSVISDWDLTGNAGSLLPFWNEYIQKESKKWTDCADLDLSLWNGSLRKMGLGSWYSVRISVLKVVKPENLRKTYSQSSRYLWQDIMECVPPPIVEEDEKLPKPKKNKSSKIPAGKTQRIRLFPTQEEKSKLKRWMGTARWTYNRCLVAVKKEGIERTKKALRAQCLNAANFNNTELQWVLETPYDIRDEAMNDLLKSYSSNFAAKRKKFKMKFRSKKDQQQSIAILSKHWGKSKGVYTFLCKMKSAENLPAELHYYSRLMMNRLGEFYLCIPQPLEIWAKNQGPTQSDAVIALDPGVRTFITGYDPSGQAVEWGKNDISRIYRLSHIYDKIQSTHNSIHGKVHKQKRYKLCRVMLRIHKKIRCLINDCHHKLAKWLCQSYRIILLPKFQTQGMVRRGKRRIRSKTARMMLTWSHFRFRQYLLHKVREYPWCRVIICTEEYTSKTCGCCGHIHRKLGGSKVFRCPSCTAELDRDINGARNILLRYLTVTSKEPVXGHASYT

SEQ ID NO: 3824 - protein, 386 aa, Diversispora epigaea
MECVPPPIVEEDEKLPKPKKNKSSKIPAGKTQRIRLFPTQEEKSKLKRWMGTARWTYNRCLVAVEKEGIERTKKALRAQCLNAANFNNTELQWVLETPYDIRDEAMNNLLKSYSSNFAAKQKKFKMKFRSKKDQQQSIAILSKHWDKSKGVYTFLCKMKSAKNLLAELHYDSRLVMNQLGEFYLCIPQPLEIWAKNQGPTQSDAVIALDPGVRTFITGYDPSGQAVEWGKNDISRIYRLSHIYDKIQSTHDSIHRKLCQSYRIILLPKFQTQGMVRRGKRRIRSKTARMMLTWSHFRFRQYLLHKVREYPWCRVIICTEEYTSKTCGCCGHIHRKLGGSKVFRCPSCTAELDQDINGARNILLRYLTVTSKEPVYAGAGTYPLGPS

SEQ ID NO: 3825 - protein, 308 aa, Glomus cerebriforme
MNKEINKKQVKVISVRGGGYITKNEFFQELKEIKSDIKEIKETVIPPKQGKKEDTKITKLEVQEDKLVAQLSDGRELSIPIDCNIGLVKIKLHRAIEGIVKTCSILVKNGKYYACFACEVEPKPLPKTGKKVGGDLGLTSFLATSDGKLYQAPKTYRKAEKGLAKAGRRTSRRIKKSKRRKKAVILLAKQHEKVSNQRKDLAHRLAKELVEKHDAYKVAETGKQGVEVKAKNTSQICSECDKQREQKLKLSQRKFTCSFCPYSDNRDINAARNILKRAERSAVFLQSKGREGLGTSLQGAVPVGAVRN

SEQ ID NO: 3826 - protein, 323 aa, Glomus cerebriforme
MYLSAHQATKKLGISSDTLRRWLKQGKITAKTSPSGTRLYNISSIFPESTSQNVETTTTKKGFLYARVSSAKQKEDLEWQKQLLSSRYPTYELISDIGSGVNFKRPGLKTLLERTSHEMVSEIVVTHRVGKIGEYDIGRIFRLCKHMDDLISKKDKLASSTSKXKKKKALRVDNAISHMQKKIKQLQNEIHRKTIKFLTDEFDVVIIPPFEVSNMVNRKTRKITRKTVRKMLCWSHYKFRQRXISKAEEKGIHVIIQNEAYTSKTCSWCGNIQRIGGSEIYKCKNCNIKIDRDINGARGIFLRALLDGALILSRDHAGNNSNT

SEQ ID NO: 3827 - protein, 1090 aa, Glomus cerebriforme
MYLXAHQATKKLGISSDTLRRWLKQGKITAKTSPSGTRLYNISSIFPESTSQNVETTTTATTTTTTTTKKGFFTHGSLVPNKKRILNGRNNSSAPDTQPTDSSAISDQGSTSNDRDLRPYWNGQVMEWSQKLWLPIVTDSAALPSTSSNILTINTVFICRMQGRRAAMHRRERKAKDTKNNKYTEQKKRKTETTVNQTLSIKTYLNHSQKKILKRWLGLMRYAYNTVXRWDKNHIRPQTLNEKLKLYVDVKEGKDPDEKXKKLQRSCVWGERKFLRTVVWLGLRLRGLHNEVPANVIDESIDEALDLQQTMIIRAQNFSKKEWNHFYVRHLHNSSNLSSKRYKPNELEDGKRDLRPFHFETKRKCNKWPLQKIDCDCKFTYIRKTNEWIFHWVYEXQKQXXETQAEVHVASIDPGVRTPFTWYSPTKGVGKIGEYDIGRIFRLCKHMDDLISKKDKLASSTSKRKKKKALRVDNAISHMQKKIKQLQNEIHRKTIKFLTDEFDVVIIPPFEVSNMVNRKTRKITRKTVRKMLCWSHYKFRQRLISKAEEKGIHVIIQNEAYTSKTCSWCGNIQRIGGSEIYKCKNCNIKIDRDINGAQGIFLRALLDGALILSGEIICVAYGEFRKGYNGDKEDTRVLFYGLRYIIENYIAIKWSKKDVELAEKFFATHNAGFTAFQFPKDLFLKFIEENNGYFPVKIESLPEGTSCYVHTPVFQITAEKEYSLLVTYLETIITMVWYPTTVGTLSRRARDRIEKAYQETVDDEGFWTLENQLHDFGFRGCTSIEQSIIGAAAHLLNFSGTDTMNAAYYVQFLLNNGKPVATSIPATEHSVMTAHKTERDAILREISNYGTGKFACVMDSYDYSNALDKVLPSIAKQKLEKGGFMVLRPDSGDPIEVVLMALKSADKVFGSDVNKKGYKVIRGASVIQSDAVTIESLEAILKTVKEAGFSAQNVTFGMGGGLLQKLNRDTMSFATKLSHITYADGTRRDIMKTPKTDSGKISLPGEFGVKKNKQGIPIVHPKENCLENDPDNLLKVVYDHGKVCEWEDFETIRNRVAKEWPSLPLSYDNISPELKIKIEKIIQEIKTTQS

SEQ ID NO: 3828 - protein, 338 aa, Glomus cerebriforme
MLLRVTFGIAPANITDEAIDEALTAKEEVIKRNSEQQKMSTHSLKFRTLKALRQTMSIRSINFSRKTWNKFYVTYLHTSEIYTRNSYKKSQYNVQQKLWPLHFEKKRTNNNWPEPNLVKYDSKLSYSEKLNEWIFSWVYEKQRQVHKTQADCGLHAVSIDPGIRSPFTWYSPTKGTEKIGLNDIGRIIRICFFIDKLCSKRDKILTCISKRKKNKAHCIDKAISRLRRNIKRLQTEIHRKTIKFLTREFDVIIIPPFEVSDMVNHKTRKITRSSVQKMLCWDHYLFHQRLVSKAEELGISIIIQNETYTSKTCSCCGYVKNINGKKVYKCDQCKTVID

SEQ ID NO: 3829 - protein, 512 aa, Glomus cerebriforme
MTSQLKHCDDRPPPEGLQSLGHLVENDAIQLQTYKESLEITNRHSSCKRQRSVTPESAQNINETTLSDKSQISDSTTQSTKLSATLVQGSTGNAEVLLPFWNEYTQEESRKWWLPERTDCVDLDPSLWSGSLKRMGLGSWYSVRMSVPKVVKQENLRKTCSRSSRYLWQDITECAPPPTVEEDEKLPKPKKNKSSKIPAGKTQRIRLFPTQEEKSILRRWMGTARWTYNRCLVAVEKEGIARTKKALRAKCLNAANFNNTELKWIDNNLPAELHYDARLVTNRLGEFYLCIPQPLEIWAENQGPTQSEDAVIALDPGVRTFITCYDPNGIAIEWGKNDISRIYRLSHIYDKIQSKHDSIHGKVAKRKRYKLRRVMLRIHKKIHCLINDCHHKLAKWLCQSYRVILLPEFKTQGMVKRGKRRIRSKTARMMLTWSHFRFRQFLLHKIREYPWCRVIVCTEEYTSKTCGCCGHIHQKLGGSKVFRCPNCAAELDRDINGARNILLRYLTLLHSN

SEQ ID NO: 3830 - protein, 285 aa, Glomus cerebriforme
MYLSAHQATKKLGISSDTLRRWLKQGKITAKTSPSGTRLYNISSIFPESTSQNVETTTTATTTTTTTTKKGFFTHGSLVPNKKRILNGRNNSSTQPTDSSAISDQGSTSNDWDLRPYWNGQVAEWSQKLWLPIVTDSAALPSTSSSIYSPSILQNSWFSSTIRHPMIIIPPFEVSNMVNRKTRKITRKTVRKMLCWSHYKFRQRLISKAEEKGIHVIIQNEAYTSKTCSWCGNIQRIGGSEIYKCKNCNIKIDRDINGARGIFLRALLDGALILSGDHAGNNSNT

SEQ ID NO: 3831 - protein, 472 aa, Gigaspora rosea
MKRKKKKNNSESQKRIKPWAWSENISSRLWLPIDTNINKIENNNHKRVNFVEGCQSWFNTTSYEKTIKSNQKYFVLEPGDDKDYNPDNPDDVEEVLKTKKIRLYPTPEEAKKLRTWIDGARWTYNQAVNMHFYHGCHDFKLIRQNCLNDEYIERNPHIHWLFDTPRAVRESAIRQYKKAYQIQKKIRGKNFTMHYRSKKAKIQSIMVVARDYNREKGQFSFLKHIVSSEQLPKVNNTVIITLDKLGRFFIHIPVPLEDRENQTSCNGRIVSIDPGVRTFATYYDPRGRVVEWGSGDFGRIFRLCKQYNKFKSDLAIKKGGRYKRTRYLLRKKMYRTLLKIRNLTNEIHHKLAKWLLDHYDTILLPEFSTSNMVKRKNRKIRNKTARAMLTWGHFGFREFIKHKSREYYNKNVIICSEEYTSKTCGNCGFINNIKGAKRFSCSSCKISIDRDFNGARNIMLKYLIESDILLGI

SEQ ID NO: 3832 - protein, 554 aa, Gigaspora rosea
MLYLKIATPGRKVSLTDTALLVPHLNPKNTLATENQKYKLAQNKITYLSASKIQGTYDVSVETLRQWAASRKVAIVKTPGGKRLYSITDIYKAFGNDRRLPESMQKAKDPKSLVTSVQDSIGNAGGFLPFWNEYTLEESKKWWLPKKTVCVALDPNLWSGSLKKWNTARGIRFRHLCNDNETGELAEDLLSIVTVFVVRDIMDYALLPIAKEEKIPPKRFKSSKKEVMKLPAGKIGTARWTYNRCLIAVEKEGVKRKKKDLRARCLNAVNFQNKTKLEWVLETPYDIRDEAMNDLLKGYATNFAANRKNFKMKFRSKKDPQQSIAILSKHWGKSRGEFSFLHKMNSAESLPKQLEYDSRLVINRLGEFYLCIPEPLKIQAENQGPLFSENQEKDPSGMAIEWGKNDICRIYRLCHIYDRLQSKRDMNHGKRNKCKHYRLQRVMLHIHKRICCLVHECHHKLTKWLCENYRIIILPEFRTQRMVRRGQRRIGSKTAEPCVREEYTSKTCGFCGYIHHKLGGSKVFRCPKCKTELDRDINGARNILLRYLTKNESV

SEQ ID NO: 3833 - protein, 544 aa, Gigaspora rosea
MESESTHYENDQMKERSNICPQLTANDSTLLKAFQDCLEITSNPNKRKRPVIHESARTSKKRILNDNANTSNNDTRIREKIFYPFWTDASKELSSKLWLPEGIDYVNIKSDSWFSVQMCKIPIMENWPKICYELLPPDITVCEPYLTNLTRVNENKKKQTKTGKQQKNESLKMRKIRLYPNTEQQAILKRWMGTSRWTYNQSLRIYKSGVKDLKLVRKLVINKENFENDKDKCWVLKTPSSIRDNAFLEFKKNLKTELKKKRKFVMKFKSKKYCKKDQIRINVRDYDREEGQFSFLKKIKKSEAIDMKNKNEIIISRDKLNMYYLHVPIPLSIRNEKEGGIISLDPGVRSFITGYDPGGNVVEFCKNDFSRLSRLCVRHDKYQSQSIEVNSRKRYVIKRKMRRIYHKIRNLVDDCHKKIARYLCDNYQTIVLPIFETQGMVRRAKRKIRAKTARNMLTWSHFRFRQFLLQKMSEYPGRRLIICTEEYTSKTCGRCGYVKNNLGGNKKFKCDECGLIIDRDVNGARNILLKLLSQVIPDAMAYHP

SEQ ID NO: 3834 - protein, 453 aa, Gigaspora rosea
MKRKSSITRKSVQKRRKKISTDNVNTSGRDFQTTNSTENVRTLRPFWNHHTEEISKKLWLPKNVGFSNGSLVRTIQRSWYSVRTSTLMTPNPVSLPRIYYHSLLRQGSNDDEKNDDGKKMKTENDDDDDGGKKMKTRKIRMYPTPEEKETLRKWMGTVRWTYNKALSMMQDDGISNMKIITRHYLNDEGIMNNELSWVKQTPREIRSQVIRQLKSAYKTNKKLHGNNFRMKYKSKKDRTQTISILARDWKRNKGEYAFLKTIITSEKPPEINHTVNITMNRLGHFYLCVPVSIKIIDNQDDVRGRIIFLDPGVRTFMTGYDPDGQLIEWGNGDLDKVYKLSKKYDKLQSDKDLALGRINKRKRFRLRKKMLRIVYRIRNLIDECHHQLAKWLCANYEIILLPKFETSRMVLKNKREIRSKTARAMLTWSHYRFRMFLNHKSREFKGCKIIECT

SEQ ID NO: 3835 - protein, 544 aa, Gigaspora rosea
MESESTHYENDQMKERSNICPQLTANDSTLLKAFQDCLEITSNPNKRKRPVIHESARTSKKRILNDNANTSNNDTRIREKIFYPFWTDASKELSSKLWLPEGIDYVNIKSDSWFSVQMCKIPIMENWPKICYELLPPDITVCEPYLTNLTRVNENKKKQTKTGKQQKNESLKMRKIRLYPNTEQQAILKRWMGTSRWTYNQSLRIYKSGVKDLKLVRKLVINKENFENDKDKCWVLKTPSSIRDNAFLEFKKNLKTELKKKRKFVMKFKSKKYCKKDQIRINVRDYDREEGQFSFLKKIKKSEAIDMKNKNEIIISRDKLNMYYLHVPIPLSIRNEKEGGIISLDPGVRSFITGYDPGGNVVEFCKNDFSRLSRLCVRHDKYQSQSIEVNSRKRYVIKRKMRRIYHKIRNLVDDCHKKIARYLCDNYQTIVLPIFETQGIVRRAKRKIRAKTARNMLTWSHFRFRQFLLQKMSEYPGRRLIICTEEYTSKTCGRCGYVKNNLGGNKKFKCDECGLIIDRDVNGARNILLKLLSQVIPDAVAYHP

SEQ ID NO: 3836 - protein, 415 aa, Gigaspora rosea
MLSYSYNKKRKYVSQKSQAINSKIVKTSIQTLKTFKPYWNEFTKEITQKLPLHITAAMNLNTLNSPSIRLAQNSWFSVKALKCKAQQDDSQAASHSKQKETLIKWFGATRWTYNQALSAVEKDGIHRNKKALRAKCVDNENFQNENKWVLETPYDIRDEGMNDLLKAYKTNFAAHKKEFKIKYRSKKDESESIVIHSKHWVKAGVFYPNFFGKEPIRGAELLPDESENQAPQWTSIEERILSLDPGVRTFSTGYSPSGLAVEWGKMTLEEFIVSVMLLTNYKASSHKKKFGIKNVTVLLPEFETQRMVKRANRRIRSKTARAMLGWSHYRFKQRLINKTREYPWCRVIICDEHYTSKTCGNCGYLHKKLGSNKTFKCPQCQIGMDRDINAARNILLRFLTLNRAESSDLALGPTP

SEQ ID NO: 3837 - protein, 508 aa, Gigaspora rosea
MESESTHYENDQMKERSNICPQLMANDSTLLKAFQDCLEITSNPNKRKRPVIHESARTSKKRILNDNANTSNNDTRIREKIFYPFWTDASKELSSKLWLPEGIDYVNIKSDSWFSVQMCKIPIMENWPKICYELLPPDITVCEPYLTNLTRVNENKKKQTKTGKQQKNESLKMRKIRLYPNTEQQAILKRWMGTSRWTYNQSLRIYKSGVKDLKLVRKLVINKENFENDKDKCWVLKTPSSIRDNAFLEFKKNLKTELKKKRKFVMKFKSKKYCKKDQIRINVRDYDREEGQFSFLKKIKKSEAIDIKNKNEIIISRDKLNMYYLHVPIPLSIRNEKEGGIISLDPGVRSFITGYDPGGNVVEFYATDLSKIRNLVDDCHKKIARYLCDNYQTIVLPIFETQGMVRRAKRKIRAKTARNMLTWSHFRFRQFLLQKMSEYPGRRLIICTEEYTSKTCERCGYVKNNLGGNKKFKCDECGLIIDRDVNGARNILLKLLSQVIPDAVVYHP

SEQ ID NO: 3838 - protein, 320 aa, Gigaspora rosea
MSHKNLKQSIQKISQKLTLHITVATNLNTLNSPLIRLAQNSWFSVKALKCKAQQDDSQAASHSWVLETPYDIRDEGMNDLLKAYKTNFAAHKKEFKIKYRSKKDESESIAIHSKHWVKAGVFYPKFFGKEPIRGAELLPDELKYDCRLQKTRLGEFFLCLPMSLEIRRVRTFSTGYSPSGLAVEWGKNDIGRIYRLCHALDKLQSKWSQKEVRHKKRYRLKRAARRIRKKIRNLIDEQSLINKTREYPWCKVIICDENYTSKTCGNCGNLYKKLGSNKTFKCPQCQIEMDRDINAARNILLRFLTLNRAESSDLALGPTP

SEQ ID NO: 3839 - protein, 275 aa, Gigaspora rosea
MNDLLKAYKTNFAAHKKEFKIKYRSKKGESESIVIHSKHWVKAGVFYPNFFGKEPIRGAELLPDELKYDCRLQKTRLGEFFLCIPMSLEIRSENQAPQWTSIEERILSLDPGVRTFSTGYSPSGLAVEWEKNDIGRIYRLCHALDKLQSKWSQKEVRHKKRYSLKRAARRIRKKIRNLIDEVHKKFTKWIVEQYHIVLLTEFETQRMVKRANRRIRSKTARAMLGWSHYCFKQRLINKTREYPWCKVIICDEHYTSKTCGNCGYLSQKTRIKQNF

SEQ ID NO: 3840 - protein, 426 aa, Gigaspora rosea
MNRSFPGFMNDKRSQKTHERFVAIDPGVRTPFTTYSPSEGTCEIGKNDSQRLIRLAYHADKLSSKRDKLNNSSSKRKKKKGIRIDKAIARIFRKIKNLRNELHKKTINYLVKNYNVVIIPEFGRLKSKAEETGVEIIIQDEAYTSKTCSWCDRDVNGARGIFLRALLDGAICMHMAGFKKKLDRTGTKFLQTVGSIEKTVDKEFEEEERRFKSLEAKSEKLHKEAKGYLDSLRAITSAQSRIAETIEHFYEDSTDDTLAGKKYKDAIDRLEQDCREYLDDPYRQTVTEPIGRFCAYFPDINEAIKKRDKKLLDYDSQRAKVRKLVDKPSDDANKLPRAEQAANEAREIYESLNTQLVNELPRLIDLRVPYFNPTFEALVKIQLRFCQESYESLNSLQEYFADHDQVDNKVEAVLQKMRDLAICGMG

SEQ ID NO: 3841 - protein, 544 aa, Gigaspora rosea
MESESTHYENDQMKERSNICPQLTANDSTLLKAFQDCLEITSNPNKRKRPVIHESARTSKKRILNDNANTSNNDTRIREKIFYPFWTDASKELSSKLWLPEGIDYVNIKSDSWFSVQMCKIPIMENWPKICYELLPPDITVCEPYLTNLTRVNENKKKQTKTGKQQKNESLKMRKIRLYPNTEQQAILKRWMGTSRWTYNQSLRIYKSGVKDLKLVRKLVINKENFENDKDKCWVLKTPSSIRDNAFLEFKKNLKTELKKKRKFVMKFKSKKYCKKDQIRINVRDYDREEGQFSFLKKIKKSEAIDMKNKNEIIISRDKLNMYYLHVPIPLSIRNEKEGGIISLDPGVRSFITGYDPGGNVVEFCKNDFSRLSRLCVRHDKYQSQSIEVNSRKRYVIKRKMRRIYHKIRNLVDDCHKKIARYLCDNYQTIVLPIFETQGMVRRAKRKIRAKTARNMLTWSHFRFRQFLLQKMSEYPGRRLIICTEEYTSKTCGRCGYVKNNLGGNKKFKCDECGLIIDRDVNGARNILLKLLSQVIPDAVAYHP

SEQ ID NO: 3842 - protein, 519 aa, Gigaspora rosea
MIPQPPPLPKRKVFYTHVPQVKKKTLKDRNRSLNPDSRIMSSSMMSVQISLQSTPSLSVEYKEEDQLCTEESGKPKTIKARSKKKRKIETSVNRTLSIKTYPNHSQKKILKRWLELMRYAYNTVVRWNKNRRFCNSSKNFEWIKPYTLNEKLKLYTDIKEGKDLNEKDKKLRRSCVWGERKFLRTVVWLELRLKGLHDKVPANIIDESIDDALIARKNIIQKNLKDTKKSFLSFKSKKDLRQTMTIRAQNFSKKDWNHFYVTHLHNSSTLLSKRCKPNDFEGGKRDLCPFHFEKKRKHNKWPSQRIDCDCKLTYLHKTNEWIFYWVYEAQKQIRETQADVHVVSIDPGVRTPFTWYSSTKGAGKIGEYDIGRIFRLCKHIDDLISKKDRLASSISKQKKKKALRVDKAIFRMKRKISRLQEEIHRKTIKFLTDEFDMIVIPSFEVSNMFRQRLIPKAEEKGINVIIQNEAYTSKTCSWCGNIQNIGGSEMYKCKNCNIKIDRDVNGARGYFFGLCLMEP

SEQ ID NO: 3843 - protein, 330 aa, Gigaspora rosea
MNKQFFFRILLKHRIKTTKEWAFMEKVSYEVLDHSITSAILARDKVIRRNYELQSKGQPPRHKLNFLSKKNEKQTITIRTRHCHEPLRFYLRLLHNKQLIQATPKKLRQWTFIWVYSKDICENQTDYTHVVAIDPGVRTFLTWYSPSIGYGNFGDNDINRIFRLELALDNLISRTARTPAKKCNSMKCAQARLRKRIQNLINEVHKKAALWLARTFDVIVLPTFGSTRMSRRQKRKINSKIVQKMMSWAHARFRKRLISKMEEFGKIVITSVSEAYTSKTCSKCGYIKYNLGGNKGFRCNKCGFQINRDLNGARGIFLWALLDGVIVMQA

SEQ ID NO: 3844 - protein, 478 aa, Gigaspora rosea
MKRKREIESGIKPFWNNICEDVTNRISLPIDLDVTERCNNKYSESERHSSSWFNITERSDVLREGIDLFVPSNEKEPLKDDELKTRKIRVYPTPEEREVLSNWMNTSRWIYNRCLDCIKDGICTVNKKSLREKCVNNHNYEGTDLHWVLETPYNIRNDVMQELVKNYKTNLKTYKNKKIKFDMKFRSRKNFTQSLPIQARDFNRKQGVCSFLNRIIISEPLPEIKHDFNIVCDQLGRWYFCVPVELEKRTSKKGIISLDPGVRTFMTGYDPSGSVIHFGQNDIKRIFRLCKRYDKYKSDRDLVKGRENKRRRYRLRKKMFGINQTIRCLVDEIHHKLAKHLCDNYSVNLLPRFKTKNMVRKKNKEELENQEPEQDSVELFKKKLKRKIKSKTARMMLTWSHYRFQQFLLHKSRKYENNRVIICTEEYTSKTCTRCGSINQKLGGSKVFKCRECKLTIDRDVNGARNIFLKYVSEHMLL

SEQ ID NO: 3845 - protein, 430 aa, Gigaspora rosea
MKRKREIESGIKPFWNNICEDVTNRISLPIDLDVTERCNNKYSESERHSSSWFNITERSDVLRESIDLFVPSNEKEPLKDDELKTRKIRVYPTPEEREVLSNWMNTSRWIYNRCLDCIKDGICTVNKKSLREKCVNNHNYEGTDLHWVLETPYNIRNDVMQELVKNYKTNLKTYKNKKIKFDMKFRSRKNFTQSLPIQARDFNRKQGVCSFLNRIIISEPLPEIKHDFNIVCDQLGRWYFCVPVELEKRTSKKGIISLDPGVRTFMTGYDPSGSVIHFGQNDIKRIFRLCKRYDKYKSDRDLVKGRENKRRRKKNKEELENQEPEQDSVELFKKKLKRKIKSKTARMMLTWSHYRFQQFLLHKSRKYENNRVIICTEEYTSKTCTRCGSINQKLGGSKVFKCRECKLMIDRDVNGARNIFLKYVSEHMLL

SEQ ID NO: 3846 - protein, 535 aa, Gigaspora rosea
MESESTHYENDQMKERSNICPQLTANDSTLLKAFQDCLEITSNPNKRKRPVIHESARTSKKRILNDNANTSNNDTRIREKIFYPFWTDASKELSSKLWLPEGIDYVNIKSDSWFSVQMCKIPIMENWPKICYELLPPDITVCEPYLTNLTRVNENKKKQTKTGKQQKNESLKMRKIRLYPNTEQQAILKRWMGTSRWTYNQSLRIYKSGVKDLKLVRKLVINKENFENDKDKCWVLKTPSSIRDNAFLEFKKNLKTELKKKRKFVMKFKSKKYCKKDQIRINVRDYDREEGQFSFLKKIKKSEAIDMKNKNEIIISRDKLNMYYLHVPIPLSIRNEKEGGIISLDPGVRSFITGYDPGGNVVEFCKNDFSRLSRLCVRHDKYQSQSIEVNSRKRYVIKRKMRRIYHKIRNLVDDCHKKIARYLCDNYQTIVLPIFETQGMVRRAKRKIRAKTARNMLTWSHFRFRQFLLQKMSEYPGRRLIICTEEYTSKTCGRCGYVKNNLGGNKKFKCDECGLIIDRDVNGARNILLKPLVIK

SEQ ID NO: 3847 - protein, 300 aa, Gigaspora rosea
MYLKLRSKNVYDEIPNNIIDETVDEAIKNFNAKKNGTKLKFKTRKDLKHTITIHATNFSKKEWNRFFITYLFNDSIKTPRKKPYELKTCSRDLRALHFETKRKNNGWPLEKIDSDCKLMYFRKTNEWILSWVHERQKETKKTHERFVAIDPGVRTLFITYSPSEGTCEIGKNNSQRLIRLAYHADKLSSKRDKLNNSSSKRKKKKGIRIDKAIARIFRKIKNLRNELHKKTINYLVKNYDVVIIPEFGRLKSKAEETGVEIIIQDEAYTSKTCSWCDRDVNGARGVFLRALLDGAICMHM

SEQ ID NO: 3848 - protein, 233 aa, Gigaspora rosea
MTIILDKLGRFYIYISVLLEDRESQTSCNGQIVSIDSGIRIFATCYDPRDHIVEWSNGDFVRIFRLYKQYNKFKSDLATKKGGRYKHTRYLLRKKMYQKVLKIRNLVNEIHHKLTKWLLYHYETILLIPEFGTSNMVKRKNRKIRSKTACAMLTWGHYRFREFIKHKSREYYNKNVIICSEEYTSQTCGNCGFRNNIRGAKRFSCISCKISINKDFNGARNILLKYLIESDIL

SEQ ID NO: 3849 - protein, 499 aa, Gigaspora rosea
MKRKSSITRKSVQKRRKKISTDNVNTSGRDSQTTNSTENVRTLRPFWNHHTEEISKKLWLPKNVGFSNGSLVRTIQRSWYSVRTSTLMTPNTVSLPRTYYHSLLRQGSDQPKTTENDDDDDGKKLKTRKIRMYPTTEEKETLRKWMGTVRWTYNKALSMMQDDGISDMKIITRHYLNDEGIMNNELSWVKQTPYATRSQVIRQLTRAYKTNKKLHGNNFRMKYKTKKDRSQTISILARDWKKNRGEYAFLKTIITSEKPPEINNTVNITMNRLGHFYLCVPVPMKIIDNQDDVRGRIISLDPGVRTFMTGYDPDGQLIEWGNGDLDKVYKLSKKYDKLQSDKDLALGRINKRKRFRLRKKMVRIVHRIRNLVDECHHQLAKWLCANYEIILLPKFETSRMVLKNKRKIRSKTARAMLTWSHYRFRMFLNHKSQEFKGCKIIECTEEYTSKTCGNCGLIKNNLGGSKTFRCESCDLVIDRDVNGARNILLKYLTEGQVLA

SEQ ID NO: 3850 - protein, 508 aa, Gigaspora rosea
MKRKSSITRKSVQKRRKKISTDNVNTSGRDFQTTNSTENVRTLRPFWNHHTEEISKKLWLPKNVGFSNGSLVRTIQRSWYSVRTSTLMTPNPVSLPRIYYHSLLRQGSNDDEKNDDGKKMKTENDDDDDGGKKMKTRKIRMYPTPEEKETLRKWMGTVRWTYNKALSMMQDDGISNMKIITRHYLNDEGIMNNELSWVKQTPREIRSQVIRQLKSAYKTNKKLHGNNFRMKYKSKKDRTQTISILARDWKRNKGEYAFLKTIITSEKPPEINHTVNITMNRLGHFYLCVPVPMKIIDNQDDVRGRIISLDPGVRTFMTGYDPDGQLIEWGNGDLDKVYKLSKKYDKLQSDKDLALGRINKRKRFRLRKKMIRIVNRIRNLIDECHHQLAKWLCANYEIILLPKFETSRMVLKNKRKIRSKTARAMLTWSHYRFRMFLNHKSQEFKGCKIIECTEEYTSKTCGNCGLIKNNLGGSKTFRCESCDLVIDRDVNGARNILLKYLTEGQVLA

SEQ ID NO: 3851 - protein, 275 aa, Gigaspora rosea
MNDLLKAYKTNFAAHKKEFKIKYRSKKDESESIVIHSKHWVKTGVFYPNFFGKEPIRGAELLPDELKYYCHLQKTRLGEFFLCLPMSLEIRSENQAPRWTSIEERILSLDPGVRKFSTGYSPSGLTVEWGKNDIGRIYRLCHALDKLQSKWSQKEVRHKKRCRLKRAARRIRKKIRNLIDEVHKKFTKWIVEQYHIVLLPEFKTQRMVKRANRRIRSKTARAMLGWSHYCFKQRLINKTREYPWCKVIICDEHYTSKTCGNCGYLSQKTRIKQNF

SEQ ID NO: 3852 - protein, 392 aa, Gigaspora rosea
MENWPKICYELLPPDITVCEPYLTNLTRVNENKKKQTKTGKQQKNESLKMRKIRLYPNTEQQAILKRWMGTSRWTYNQSLRIYKSGVKDLKLVRKLVINKENFENDKDKCWVLKTPSSIRDNAFLEFKKNLKTELKKKRKFVMKFKSKKYCKKDQIRINVRDYDREEGQFSFLKKIKKSEAIDMKNKNEIIISRDKLNMYYLHVPIPLSIRNEKEGGIISLDPGVRSFIAGYDPGGNVVEFSKNDFFRLSRLCVRHDKYQSQSTEKIARYLCDNYQTIVLPIFETQGMVRRAKRKIRTKTARNMLTWSHFRFRQFLLHKMSEYPGRRLIICTEEYTSKTCGRCGYVKNNLGGNKKFKCDECGLIIDRDVNGARNILLKLLSQVIPDAVAYHP

SEQ ID NO: 3853 - protein, 287 aa, Gigaspora rosea
MHRRKKKEKNINHEKKQEKKTGRRREQIIECEIVSESCAETLVETMDEIGTIPENDRIFEIKKQEGLRTPYDLKECSRDLRALHFETKRKNNGWPLEKIDSNCKLTYLRKTNEWILSWVHERQKESKKTLERFVAIDPEVRTPFTTYSPSEGTCEIGKNDSQRLIRLAYHADKLSSKRDKLNNSSSKRKKKKAIRIDKAIARIFRKIKNLRNELHKKTINYLVKNYDVVIIPEFGRLKSKAEETGVEIIIQDEAYTSKTCSWCDRDVNGARGIFLRALLDGAICMHM

SEQ ID NO: 3854 - protein, 285 aa, Gigaspora rosea
MLLSKNDAESRCSSNKRGRGLRLFTILPHTSFQQWFVLIDSDALYQIFSKINFCGLGKVSKSDFNKNIEEWWRVVFRIDKVTTTQQRFGFSIMTDGMSVSANLKRRDNDHIVGLDPGRKDLFVAMNIPTPSCSSITSYNNYLTYALQHMRTLIEFYGERCWLLAYGDGKFSSCSKGHVSGPIKGLYRELKRRLGKRVRLVDEYRTSIICSTCNGRMDKRSRFWSLKVSFQTLWNRDTNAARNIRRLFFYMNFNNGERLEEFRRSQNRGGEELPFTVATSGVSSDA

SEQ ID NO: 3855 - protein, 276 aa, Gigaspora rosea
MKTPRKKPYEPKTCSRDLRALHFETKRRNNGWPLEKIDSDCKLTYFRKTNEWILSWVHERQKESKKTHERFVAIDPGVRTPFTTYSPSEGTCEIGKNNSQRLIRLAYHADKLSSKRDKLINSSSKRKKKKGIRIDKAIARIFRKIKNLRNKLHKKTIDYLVKNYDVVIILEFGVSNMVKKEKRKINSKVVRCMLTWSHYMFRQRLKSKAEETGVEIIIQDEAYTSKTCSWCSNIQNIGGRKIYKCKNCNLIIDRDVNRARGIFLRALLDGAICMHM

SEQ ID NO: 3856 - protein, 433 aa, Gigaspora rosea
MNYHKISLQSTPSLSVEYKEEDQLCTEESGKRKIKTINTRSKKKRKVETTVNRTLSIKTYPNHSQKKILKRWLGLMRYAYNTVVRWNKNRRFCNSSKNFEWIKPYTLNEKLKLYTDIKEGKDLNEKDKKLQRSYVWGERKFLRTVAWLELRLKGLHDKVPANIIDENWNHFYTTYLHNSSTLLSKRCKPNDFGGGKRDLCPFHFEKKRKHNKWPQKINCDCKLTYLRKTNEWIFHCVYEAQKQIRETQADVHVVSIDPGVRTPFTWYSSTKGVGKIGYYDIGRIFRLCKHTDNLISKKDRLASSISKRKKKKALRVDKAIFRMKRKIKRLQDEIHRKTIKFLTDEFDMIIIPPFEVSDMVNRKSRKITRKTVRKLLCWSHYKFRQRLISKAEEKGIHVVIQNEAYTSKTYTVVGVEIFRILEDQKCTIARIVA

SEQ ID NO: 3857 - protein, 395 aa, Gigaspora rosea
MESESTHYENDQMKDRSNICPQLTANDSTLLKAFQDCLEITSNPNKRKRPVIHESARTSKKRILNDNANTSNNDTRIREKIFYPFWTDASKELSSKLWLPEGIDYVNIKSDSWFSVQMCKIPIMENWSKICYELLPPDITVSSNFEEMDGHIQMDLQPKFEYLQVRSKRSKVGAQARDKQGKFRKRQGQVLGVEDSIIDLSFITGYDPGGNVVEFCKNDFSRLSRLCVRHDKYQSQSIEVNSRKRYVIKRKMRRIYHKIRNLVDDCHKKIARYLCDNYQTIVLPIFETQGMVRRAKRKIRAKTARNMLTWSHFRFRQFLLQKMSEYPDRRLIICTEEYTSKTCGQCGYVKNNLGGNKKFKCDKCGLIIDRDVNGARNILLKLLSQVIPDAVAYHP

SEQ ID NO: 3858 - protein, 891 aa, Gigaspora rosea
MRLPFQAVLKEERSNLPKNTTNVILNNVRNNVYAPLCPTNLMWNNRNGLGQIISSMARLHATNCQNHVVVNLHNCVTCWIQWKLEKQLQFISKKNNYKLNPQYRILVEIRARYIFQKVKQVILENKLISEDVIKQEWWNYLQPLWKILITFEKNYRIDAESRCSSNKQGRGLRLFTILPHTSFQQLFVLIDSDALYQIFSKINFCGLEKISKSDFSENIEEWWRVAFRIDKVTTTQRRFGFSIMTDGMSVSANLKKEVTKQDIPVTTTQRRFGFSIMTDGMSVSTNLKKEVTKQDIPVNAYGFDKEDIPTPSCSSITSYNNYLTYVLQHMHTLVEFYGERRWLRMRWKSYINRNKAYDKICERITKKNPRTIVAYGDGKFSSCSKGHVSGPIKGLYKELKRRLGKRVRIVDEYQTSIICSTCNGRMDKRSRFWSLKTLWNRDTNAARNIRRLFLYMNSNNGERLEEFRRTQNRGGEELPFAVATSGKYLKIFDIDMATIKVVHGSVSRRFAIGTDTTWSNLESQFRNLFQIPSHAQLIATYIDEDGDNVALSSDLELAEVISQCSAGTAIKIILKTKPTIDETAAAFEQISLEDEESYETIIYSHSEPEETEEQGTCKETCEEIYEEVIYSADEVHEQGQTDYSSSDPEIYFFVSRKRSHRGPRRIYSGSAKLESFGGPSACPFAERSRGPHGRGHARMHRVHKHGEPGHHHHRGHRFRGHRYPYKMCKRDGGNENERMEDKSDKCPEMNESGPSFKEEHHHGHHMHHRKCDKKAKLYSSGDERPRHHCARVHAHPYFHHKHGHGHHGRHGDHGEIPPERIAEKLEILNGLSFPTENNSHYEELLKRYHGRIGLVVEAVVREQRKKEPKEPEDDDPEGDEGQASTSQPMQS

SEQ ID NO: 3859 - protein, 349 aa, Gigaspora rosea
MQKVDAVPISEVADYVYLRFYHIPVLNNGKISKSEFSENIEEWWRVLFQIDKVATTQRRFGFSIMTNGMSVSTNLKKEVTKQDIPVNAYGFDKEGNFYSLDVRDNDCIVGLDPGRKDLFVAMSEEKKPIRCSTKEWHILSGHVYARKKTEVWIKGNNIFENILHNIPTPSCSSITSYNNYLTYVLQHMRTLVEFYGERRWLRMRWKSYINRNKAYDKICERITKKNPRTIVAYGDGKFSSCSKGHVSGPIKGLYRELKRRLGKRVRFVDEYQTSIICSTCNGRMDKRSRFWSLKTLWNCDTNAARNIRRLFLYMNSNNGERLEEFRRTQNRGGEELPFTVATSGVSSDA

SEQ ID NO: 3860 - protein, 1186 aa, Pogostemon cablin
MREPLVGERFARMKIPCPGPLPRLVALPVHDDGVHRYVWIEDVVANHLEHLFPGLETVAAYPFRVTRNADIEIQEDEAEDLLRTIEEGIRRRHFEYVTRLEIPPTMPESVRRVLIDGMEMDTENVIEVEGEVGHASLMELLKIDRPDLKFAPHVPRIPPGLTTGEDLFSIIARHDVLLHHPYDSFTPVTDFIQTASRDPYVRAIKQTLYRLGPNSPLVPALIEARDADTQVAALVELKARFDEQNNIQWARRLEDAGVHVVYGLIGLKTHCKVTLVVRRESSGIRRYLHLGTGNYNATTSRFYTDYSLFTADPDLGADATHLFNYLTGYARKEDFKRLLVKMLVAPVNLRERLSAMIAREAEHARLGRPARLIFKMNALVDPGMIDLLYSASQAGVKVDLLVRGVCSLRPGLPGVSDNITVTSIVGRFLEHARVYYFENGNMHVFPKIWHNKLVRKTFKYRLLPTKTQETGMQDILNECRWLYNHLLEKRKTAWEGQQESLTYYGQKKTLPDLKAVRSSLKTVHSQTLQDVVMRLDLAFQAFFRRVKAGETPGYPRFRGFDRFDSFCYPQCGLFYTDLXXXXTVCIRRQAGFWYVCFSVESEPAHLSPSEESVGIDVGLHDFAILSTGEAIVNPRFYCCDEKDLARVQRRVSRASKGSSARRKAKKALQKVHRRIANRRNDFVHQRSRALVNRFGTICVEDIHVNRMIHNHCLAKSILDAAWSQFFGCLSSKAEWANRQVLKVNPAYTSQDCHRCGHRQKMPLSARTYDCPCCGLSIGRDHNAALNIKRIGLGLQSIGTQSVEAAPRKSPGCIAGYMQPSRPRKESCMQVDQDIAPAQKGGSFGFWTRTPLYLRIVIALVLGIVTGLVFGQQVTWMREVSTMVLALLRALATPLILLAILHALLRTNLGGGMARRMGGYLLTNTLAAIIIGLTVANVVQPGRWAGNTLGAPTATEVTAVAEKKPYDPVEDIKSKIPTNIIKPLYDDNIIAVIILGIVFGLALRRVREEQLKEDNAAYKSVENFIETCFTAVMTALHWIIQLVPIAVYCIVSSVIGKEGFLPFQHLLGFIVAVLLALALQLCYYLMRGSSTLLPGVADLSAAHMPSAPEKNGAHDLYNNAPCGSYVIDAQGIFVSLNDTLLRWLGYSREDIVGRLRLGIRTATARRDGVFRLDELGTGLRRGGRMHR

SEQ ID NO: 3861 - protein, 368 aa, Pogostemon cablin
MQVKCYRYKLNPTKAQEALFIQFAGCRRFVWNWALARKQEQYKTTGKGVGFAALCAELTGLKKQADTAFLKEAHSQVLQQVLRDLDKAFEAFFDKRARFPKFKSRKTCPHAFRITQNVSISGQFVSVPKVGRVRAIIHRPTEGVLKSATIKQEAGAWFVVFVAHVDAPDVAPTCTHPVGLDVGLESFVTLSTGEKVKPPKFYRKGERKLARLNRAFARCQKQSHNRVKAKAKLARHHQKVKNQRSDWLHKLSAQLVGRFDTICIEDLNLKGLVKTKLAKSFSDAGIGEFLRQLEYKAAWNHGQVLKVGRFFPSSKTCSDCGGRANLTLSDREWLCGHCGASHDRDINAAVNILNEALCPERLAATTPK

SEQ ID NO: 3862 - protein, 1771 aa, Pogostemon cablin
MPKPREVKPAYLSYTEFIAWKEDRARRNRRVWSNIALFASLLAVGLEAGLHLCASMLFDPLPDVVTGIAYGWVIFFLWFNRVTLEASSADKPTWNPLVQWLGTKRSAGIALAGTSIAILVAAMATWMFAPFLPFAPVLIPTIIGSLVLVPVLDLVVLIVQFRAIRRLWQAREGDFLDRRVVTGTSLLWFAAGFFLIVRPALIGHWLAQALETTGAEQQKAFRGLRLVHGEQAMLDLTYRRNPPYWVSLGYKGKSDGYWPWVGYGWGSWRTMDARRAYFLMTGTPFESVPRPASFFHQNRWQDDVAIEETGGYVVGRPVPDLSVKTSQMQFTTNARTETAQGTWTLTFRNDNRVEQEARADILLPPGATCDQMHLPLCQMAERSDAIGMEPVDAQAGMPAFRRAYPQRQGRSATRDEQRLRQHIRRIQKPHGKAFPPLLPITDAVGGNHLAAGLPAPARTTLRPDTPESSPDVARPSATRRKCRTRCRQSSAARRPPQSPIPXXXVSEWLSVDYGRATSLRTVPYVTMTFSTNRERRTPTLPHCQGFTPRKSPAFTLIELLVVIAIIALLAAILFPVFAQAREKARSASCLSNVKQIGLAVAMYRQDYDLERCNRKPAKQDDDLRLDERQLRIEPRATQRLLRPGRQAVFGRTGEPTGKAARDSGKVNLRPEIFRGETGLHKPALQLLPGGTDIGLAGYVICPRRSLPDDHERRFTIARHQRAQETLLNDTLAVCREVYNSMVIERTALYETQGKSLSRNDQNKNLTVWKQKFPEMTTVHSQVLQNIAERVDLAFQAFFRRVRNGEKAGYPRLKGKGVYDSITFPQLTTGGCKLVGEYIQVSKIGQIKTIVHRPLVGTPKTCTIRRQAGKWFACFTCEYEPEALPKSEESVGIDVGLEKFAALSDGSFVENPRFFRKDENALAKAQRKQSRQAKGSKARKKANKIVSRIHERIRNRRHNFVHQLARRLVNQYGLIAVEKLNVKGMVKNHALAKSISDASWPQFRSVLTQKAESAVRRIVEVNPAYTSQTCSRCGNVAKKPLKERWHYCPICSLSLDRDTNAAXXXXXXXXXXXXXXXXXXXXXXHGACPRGVFTGFSVLAPRSSRSAKPDANYHTGPPDFVGVSPAVPLLGAGRFRFRLALRIRARRRLVFACLFRAGSVSVGSVELVHTEFERAASLRHDGLGLAPERHTDGRLEVVFRQLAELLLVADYGAGFRVQTQAEQCERVLADLLGFARSEHEALVRGRRQHRGFQAVRFLVGGDVEIAPRERVVPRQQAHHVKCAVNRVEAAPVGGHRSGSECERRLDPQQGQQENLNQTVNRPDAGRSASRLERENHAQDRAPDGPQQNGPLLSSPESGQQIPRRGALGAVLGDILKLELVLRLHRFAVERANRGHFGRCLEAGCGQVSRGLGLEVNRHAVPFAVEDDKTQSATLRGQAGLVQLAHDLNSAFIRTCFLERTIRGQVTDEGGCAERKRYENDGQADPGGGFHCSNSLCAATVAVVGRIPCKLRFPVTGGDAVQPEVQTRQTPRHAPDHQMVTCVEVRVLRVQRRHVFGHDIAQHRGHDRCEQNVGGGDDAALFRVLDARPQHEVGRVNEQQNRDTDLLGVPVPVVAPLRLGEDRPGNRRDETEHGRKGGGDRGFPIVQRVASPGQIAPAVHTGSDGGDHRYHRVWQVQRDHRSKTRHHEALNRLQIMERQHDQKSRGHCKKIFGNLRHKGFIPPQSFQRYSNRSSALGIEMPANDTKTRKSPAPSVHSGICPVAVPTPTAASVP

SEQ ID NO: 3863 - protein, 512 aa, Torulaspora franciscae
MATSTQNQAKKRKTSKKNTSRPFWNEDAAYNSKQWSLNTRLPMAARKLSHKINSDSRFSVNLFDQFLEGNVEKVVWMPTSHLPFKLHRDCMEMTMKALRQTLLNRETNVLEPQEQWLNDYHYDLKDEALRDLVKNYNSNSNMSKFKKTGRLFKLKFKSKKAPVQSLSVLKSTGTGERRPFGAKSYDNILLPKLNYHECSKLTRKSRSSMSALAHCSFHDRLTMKAEQFHGASVHEVEEDFTSKACSSGGNLKDDLGSAKVYSCIKSSSVFDRDFNAAKNIMLNYAIAPYRIKLASLENRLRNWDKKGSPSKLSTMFHLAKGLYNNWNRKEVYSILILGLDNAGKTTFLETLKRNYSLHSKELDKIVPTVGQNVAQIPMSKSCILKFWDVGGQENLRAMWPEYYPQCHGIIFVVDSADRSRIGECNEALKSVIMDEDVEGVPVLMLANKQDRPDAMEVQDIKQIFNQMAEKLDARDSRVLPLSSLTGEGVREAAEWLLIRLQRNKANRPPHYK

SEQ ID NO: 3864 - protein, 445 aa, Torulaspora franciscae
MATFTHNQAKKRKTSKKNTSRPFWNEDAAYYSKQWSLTTMSPLAAGKLGHKIDSDSWFSMVKHPQAPTTNHPLKLPLGSPVKEEIIRARKIQIFPTSSQKERLKKWFGCQRYIYNRALKLHRDGMEMTIKGLRQSLLNKHTNLLGPQEQWLNEFNYDLKDEALRDLVKNYISNMAKFKKTGRLFKLKFKTKKAPAQTLSVLKKHWNKGKKTFYSDIYSSLKLHASEPLPEELPGDSRLQRTRSNKYYLVVPMAGEEIARKSPAEKFIFIDPGVRTFLTGYDSNQTVVEIAKDAVVLIEKLKRRRRQLHKKRQNHRKALQRLAEKISHVVQDMHKKSALFLCKSYDNIFLPKLNYHECSKLTRKSRSSMSTLAHCSFHDRLTMKAEQFDGASVHEVEEDFTSKTYSSCGNLKDELGSAKVYSCIKCFSVFEQGLQRSKEHHAQVYL

SEQ ID NO: 3865 - protein, 482 aa, Torulaspora franciscae
MATSTQNQAKKRKTSKKNTSRPFWNEDAAYYSKQWSLNTMSPLAAGKLGHKIDSDSWFSMVKHPQAPTTNHSLKLPLGSPVKEEIIRARKIQIFPTSSQKETLKKWFGCQRYIYNRALKLHRDVQMTIKGLRQTLLNKDTNLLEPQEQWLNEFNYDLKSEALRDLVKNYNSNMAKFKKTGRPFKLKFRSKKAPVQTLSALKKHWNKGAKSFWSEVFSTSHLRGAEPLPEELPGDSRLQRTRSNKYYLVVPMAGEEIARKSPAEKFIFIDPGVRTFLTGYDSTQTVVEIGKDAVVRIEKLKRRRRQLQSKLFNLRKHKKRQNHRRALHRLDGRISHIVQDMHKKSALFLCRSYDNIFLPKLNYHECSKLTRKSRSSMSTLAHCSFHDRLPMKAEQFDGASVHEVEEDFTSKTCSSCGNLKDDLGSAKVYSCIKCSSVFDRDFNAAKNIMLKYICEHLMASGGSSTSSGGNGRLATMGPGPFVR

SEQ ID NO: 3866 - protein, 486 aa, Torulaspora franciscae
MATSTQNQAKKRKTSKKNTSRPFWNEDAAHYSKQWSLNTMSPLAAGKLGHKIDSDSWFSMVKHPQAPTTNHPLKLPLGSPIKEEITRARKTRIFPTSSQKETLKKWFGCQRYIYNRALKLDQDGMEMTLKGLRQTLLNKNINVLEPQEQWLNEFNYDLKDEALRDLVKNYNSNMTKFKKTGRPFKLKFKTKKAPVQTLRVLKKYWNRGAKSFYSEVFSSSNLRAAEPLPDELPGDSRLLRTRNNNYYLVVPLAGEQINRESAAGKFIFIDPEVRTFLTGYDSTQTVVEIGKNAVVRIEKFKRRRRQLQSKLSKFRKHRKRQNDRKALHRLDGRISHIVQDMHKKSTLFLCRSYDNIFLPELNYHECSKLTRKSRSSMATLAHCSFHDRLTMKAEQFHGASVHEVEEDFTSKTCSSCGNLKDDLGSAKVYSCIKCSSVFDRDFNAAKNIMLKYICEHLMASGGSSTSSAPSGGNGRLATMGPGPFVR

SEQ ID NO: 3867 - protein, 486 aa, Torulaspora franciscae
MATSTQNQAKKRKTSKKNTSRPFWNEDAAHYSKQWSLNTMSPLAAGKLGHKIDSDWWFSMVKHPQAPITNHPLKLPLGSPVKEEIIRARKIQIFPTSSQKGTLKKWFGCQRYIYNRALKMHNDGMLINIKNLREKLLNKKTSVLEQGEQWLNEFNYDLKDEALRDLVKNYTSNMAKFKKTGKVFKLKFRSKKAPVQTLSVLKKHWNRGAKTFWGEVLSTSHLRAAEPLPEELPGDSRLQRTRNNKYYLVVPMAGEEIARKSPAEKFIFIDPGVRTFLTGYDSTQTVVEIGKDAVVRIEKLKRRRRQLLSKLSKLRKHKKRQNHRRALHRLDGRISHIVQDMHKKSALFLCKSYDNIFLPKLNYHECSKLTRKSRSSMSTLAHCCFHDRLTMKAEQFDGASVHEVEEDFTSKTCSSCGNLKDDLGSAKVYSCIKCSSVFDRDFNAAKNIMLKYICEHLMVSGGSSASSAPSGGNGRLATMGPGPFVR

SEQ ID NO: 3868 - protein, 434 aa, Torulaspora franciscae
MTMRKVICDILATKTWSEDQLRLVVSVVKHPQAPTTNHPLKLPLGSDIKRRSSGLVKLGSIRPIRRKNVEEAVWVPALHYNRALKKHNDGMLINMKDEALHDLVKNYSNPGVRALLTVYDSSQTVVEIGKDAVVRIEKLNRRRRQLQSKLSQVRKHWKRQNHRRALHRLDEKISHIVQDMFKKSALFLCKSFDCIFLPKSNYHHCTKLARKSRASMATLAHCSFHNLLTMKAEQFDGATVYEIEEDFTSKTCSTCGNLKDDLGFARQMARFTEDLSMDRVKTELRSLQSRLSSVRPPQEFFNVKNVSKPQNFSELQSRVSYNLKYYSTNYGLIIGALSVYTLLTNILLLFVIVLVFISIAGINKLNGEDLVTPFGSFKTNQLYTALLFVAVPLGFLASPISTLLWLIGASAVTVFGHASLLEKPIETVFEEETV

SEQ ID NO: 3869 - protein, 300 aa, Torulaspora franciscae
MEPQYDVPMAARKLVIRSTATRGFSVVKHPQVNYQPLIKLPFSSGVKEEITRACNIRIFPTSSQKEALKKWFGCQRYIYNRALKLHRDGMEMTIKGLRQSLLNKDTNILKLQEKWLKDYHYALKDEALRDLVKNHNSNIAKFKKTGRPFKLRSKRRQFKPFRCWKSTGTREERRFVAHGIITTTTAVRSSVATLAHCSFHDRLTMKAEQFDGTSVHEVEEDYTSKTCSGCGNLKDDLGSAKVYSCIKCSSVFDRGFNATKNIMLKYICEHLMASGGSSTSSVPSGGNDRLATMGPGPFVR

SEQ ID NO: 3870 - protein, 474 aa, Lipomyces sp.
MQHAISETNSTGNGQPSGSDTRKKFWTEVTRGLSQEWPLVCGTSVSGSSRSVESHSWFSIEVHPQTAAPAPNSRKSFLPSLLTSDEQQSADGNDDDDDDKLRARKIRLFPTTSQKETLRQWFGAQRYIYNKCVALQQGGMKPTLKELRAVLLNSKTNQLNDSEKWLEQYEYDLKDEAIRDFMKNYKSNMAKYKETKRQFTLKARSKYAPTQSLSVLKKKWNHKMGFYSSIFSPSNMSAAEQLPTKLERDSRLLRTHSGKYFLMSPSPARKDDGKGKTTGDFVFIDPGVRTFLTCYDSNENVVEVGKDAVVRVSKLLHRRRKLQSRLAVLRDHKKRQNLRRAYIRLGERINHLIEDMHKKAARFLCANYDRVFLPKLNVHKCQKLNRKSKASMATLGHCAFFDRTALKAELFERTQVVEVVEEWTSKTCSCCGWVNHNLGRSKVFECKRCTSVFDRDFNACKNIMLKYFTEQSAR

SEQ ID NO: 3871 - protein, 1781 aa, Brevipalpus yothersi
MDGTKIETSDATSTTNPTSSNINTSTVDNTIAPTPTSCVAAVSGNNTAITTVTTTDTAVITSSVSTTPANSAVTVKSSSISTPPNVSVSATRAKKNGPRHHYETFGIFDWDEYLKNTGGVPAPAECFKQHIDPPKNEFKIKMKLEARDPRNQSSTCIATVVGLMGSRISLRLDGSDNTNDFWEMVDSSNIKPIGHCEKNGDMLQPPLGFQKNPSHWHVFVAQTLADAEHAPESAFKPEPLIPPCNYFKVGMKLEAVDRKNLRLICPATVGDVDGDQIFVTFDGWKGAFDYWCSYDSRDIFPVGYCRKSGHPLQPPGSKTPVSPREAKLLDVANPNAAPIAFLPKKSNIANGSAFTKNLKPSSTKSSTTSVTSTNPSPNTPSTSHSQSKSNTKSASYSHPQKISNEKASAFRMSHPATNESANQKTRREESGSKQPSGKLNSIQDKKTSNPMSSTPEMMSNSPSVTAHLNKSCYCGPHLDPAKIAALNPSYGPAALDTAMKILLQWILSAAKTQNDKAIVYRAIKEGNGQQYVSTNVKDVQYRIKLPHFNKNSLFWSYFKQFAKAIKCCPKLVTSTPREGICDMCSTLTKPASNINRVITSSTLNPQSHASTGTISNPSMRVGPLSNSSASQSNLKAPSNDQPHGFTPPSTSTPNSLGSQNSKKGIYPQSSDAGQSQPKNTSIVKRKRSDDMNDPPPKIGPASKMQLETNGNPSRNPKSNNQSSNTSVNGGKPKTSSMAISDPTNWNTEDVINYLTSIDPALKIHADMFRSHILSDYRSIFQSDEYVASLHLPTFDAHLTELSDDQATGLNKAGPNYYRHSDDSSSSSDGDKNRKRKNISNTTTSVSTKKRKRSECGVDGPSEDQPSTSSSSPSSSQVRGGRGGKRKRKNSNDVHEIEDSTNVTNTKEGKIFDTICCSLNQFLGITDKKGERVALTPEQEEFMMKIHHHINSGCELVSKVMVEGARYVRYHLEKQLAPPPNSTPEQCESNHDPWQSFCPKIMLKTLRVEKDESSGKKIKVREEMKNGQIDFVYLFKCLTEPTKKSKREFVLESEYKAKRDQYSLPLYPILKEKLDNQLSYNIQLYSQVFDNNITLNVRKWIKKVFRNESKKLKLNLNYKVIMATVAHLFDGGGGGGGTANSNSHFGGYVPVEPNQDLIKFFVDKFKMNNERLEQLKEFNQHRFKLIPLIYLLRKYFLDNDMRRPPKISPELKYGRKSIRYDTRALFQMFNSFKWNNGEKPRNVKEFEEKRHEWWPKYFKYEQFETSKRKFNYSFTTDGVKCCLMMVKWKVRPDGTIPSVPPNAPKDKKERKFTTASTAAKSNKDAGKTKKSRESKKVPIRDGNSAIIINDDDDDDGKIPESEFSHIVGLDPGMKLSFGGSCRSDRLIRDQDSGESKIVEHETPIKISCAAYHQKCRVVYDRVKKKKRKKKKTRKNRAKPQNSGGGGGARQNSGKSGNIAKSGPKKKLHQATRELYEETNHDKPDKSDSIDDFLSNFTKLQDFHAKRVFAKRKFTAYIRRTRAIQWMCEELVYGQIFRKNFNNTRPRKKWRALIFIGGCNNFYSGMKGYRGVPLKAIVERLKRDWSRKCVVIDNVDEYNTSQKCSQCHSKVNMPPPRRWPPANNGEEKLVPMDIWNKSKRKRKRRRIKKKKVKDELKQQSAHLSQPSQPLQPTESTAHSLPQPVSDSKRRRGRQRLRGHRYVVCQNEKCPRYHCGATTWNRDVNAGRNIATVGLAEYRGEERPKAFQRECQSNKPPNQVPPPNEVNGIGSARPLVVDQPCPPG

SEQ ID NO: 3872 - protein, 340 aa, Procavia capensis
MCRDMTQLKKTQGYEWLKKADHNSLQRAIRQLDLAYQSFFRNVKKKGVAPGYPSFKTKKNARQSYTSPASASKQYISRKTGEIRKQESSVVLYDNRIKLPKLGLVRCRVSKKVTGRILSATVIRSASGKYYVSVVFTEQEKWQILKTGKAVGIHMGTEYLITTSDGMELMNPRYFRQSAKKIARLQKELSRKAKGSKNFERSRRKLSKKYEHIHHQKMDMMQKLTTKLIREYDVICIRNEAVAEMKKRRRFSKQLADAGWGELIRQLSYKAEWYGKELIKVEPSYPNVRICSGCGYEYPLISRQRTIQEWYCPKCHIRHKRNVNAAVNILQEGMKLKEAM

SEQ ID NO: 3873 - protein, 416 aa, Characiochloris sp. AAM3
MPFFSKSTSVPACDLELGAPAASPEGQSMLKASAKLLALVVLLTMGVFMLPLLCDLGGSALMAIWPLVMTASEGASVFSRTGEESIGVGAIVVATALLAFGARLCYMSQQGHLPAGGTPWAPCAAIDKLDSPHHPPQRSIFKVPAMRVPLLARTAVVDDPTPIKRPFARFAQVKELLSSMPPVRDFGVASKLVRSRYISDALYVSRPVAFGAFAGRSIMVSGILGYYISSNYRQRTLGVYEQRQRAMEGLAHSLTRGAPRESTLIFYGNKSCGGGGCITSWMGGGPHKAFRQVLNRHAMVVTVDEHLTSQFCSGCVGASIAGDLQAAGLQPQPERRRQTATAPPHRGHQIVQQRNEDKLSGLTKFGGRIVKASYKVFRTAPLCCVLRHNKLSHNSKRSRLWNTRDWSRTRLRQSKR

SEQ ID NO: 3874 - protein, 227 aa, Characiochloris sp. AAM3
MMAYVRYVAWALGRNGILDQYHEPPREWRTGDALNKPHSAAGPAQQTCPASSKRGYRHRRLRVNIQRDRELDAIVNHVTRDCGGQRQDTVCYWGNWHGTVGGPISRQMGGPPVQQLKRRMDCRVLTIETDEHKTSTYCARCIDAYALPAGVPRLPASTRKGAAPAVPQPSNPPQQLLKLRTCNQRLEKCSHCKVVMHHDAVGSANIHHVGRCQARDKPRPVPLQRTS

SEQ ID NO: 3875 - protein, 325 aa, Tuta absoluta
MRRYSWLKEYDSLALQQAVINLDKAFANFFNKKLKARFPVFISKHGQQSSYHPNGKVLTNAIQLPKIPPIRASIHREIIGKVSSITITRNATGKYYASILADDGQKAAAKPTYITSVTGYDLGLSHYLIDNAGSKVANPRHLVNAYRRLRRDSKAISRKKLGSANRRKARIRLAAQHERVANARADFQHKLSRRIIDENQAVIVETLKSANMMKNRRLSRHIGDAAWSGFVAKLAYKAESAGVHLVKLDQWFASSKTCHCCGQKMPEMPLKVREWKCPGCNADHDRDINAAINIQHKDITELMAAGHVVKAHRGLRKSGSTPVAA

SEQ ID NO: 3876 - protein, 1401 aa, Drosophila neonasuta
MDWLCSAWRTRYNQLRSQRSRYDSSHNLVPIGKAVDTRTVKQVRQDCSWLTAVPTLVIESPSKIERTHWFAAAQRRKTLRAQGNHPGSMPRFRSRKRDDDVFTCWFNGGRNARFEMVNRNHGIVTVSGKNPPAKRLAGDKSGFRIRLHVRVSEPIRDYTSVQVNWTKRTLVFTNSPAPVDRQPTGKLVGFDRGVVHQAATSDGSFVDLPRKRLRGIDREVRRRQKAQARSLKASGHTSQREYRKAGVSNRFAAHDQEVARLKDTARRIVLDVQHKVSRSLVENYDVIVLEDLNLKAMLRSPNAKPDLLNPGRFLPNGKAAKRGLNRVLSTASMARLGELVEYKAEACGVTVVAVDPKNTSRHCPRCGHTGKGNRESQAVFSCTSCGFSSNADSVAAVNIATRGVEKLQGGAHPGVEVSKPELEFTESSVRLTCEAQTSGRTAVTSALDLLAVCVPLASCTAAVGCFRKSSRFFRGAGERPDTELELSREGDRWAAATVLCTGGIWPPDAPGVLVSADTCRLASDLGVEPAWLRFCVAEEINRFACDPQRYRPRTGTNGRGAAIADLPVGVLQEVLEASGLYRAVQEAQRLQPELVSGAEDRARQNLSYACADVDYFRELAEGPWSPVSELDTEEDLARYLRRQIRCGELLEAGARGLMSGARFNPELEHPVEYHRWGVRAFGRTLRTGPVSSATAFAASAGFVTYRISEIPEHRVHHDVPRADFLDRGLGEFLLDSASDVVWNISEVARAFLGFPALDPAAAHWWDVGVPTLVVPLLVVLALFVLPRGLFHAFSGPDVSYIVDGREGVGSVACLSPDLPERKDLDLASLASRWLGWGIYGDVAEDEQDNPASDNAVSGVPAGPYLRGRMAHAPTPVVDVQSLQERYDAVFGEYTRTELDPKTLLEGPAILDVGYPTTAAFHDALSAAQNALEADPVDPAAVEKAVEVMESAWVTAMDAAYEVGVSGMDMRKARRMDGVWATATAPAGVSDTERRKAIDAAMSYLSEVRDAHGVHLSVTSMTTDMSEVIQTDDRGRASLGADLANRLFIRCDLTDGGVELIPAEVVPAGRPYSDLNKLFDDVCADSDVLHDTRPLQKKAGPGRPRALNDSQVRRIASAPEGTSAAELGEALGVSARTVRRYRALLRDELTNLMLSFDLETTGVDVNHDRPVTSSLVTLFPDGTHTSVDWIANPGMPSHPQAAKVHGYSDAYLAEHGEDLGEVLARTIAGLREAWAAGCPVVVYNAAFDLSMLSALEPTFTVDGPVIDPMVLDKAVDPFRKGARKLVPTANLYGVAFSEDDAHDSSADALAAGFLARELVTRVLPADHRSPADVNRGYSGIDYTFAEAAGDVDLLMDLQERVRRSSMDHLRGYFDSVGKPHDGCDGGWPVQDSTVAARQAAAQ

SEQ ID NO: 3877 - protein, 1624 aa, Drosophila neonasuta
MARTPIQGFDGHLLRMTREQASLSRPDLAREIGVTDQSLKMWEIGGVSPSPKVYVRLTDYFGKDRWFFAPVPVSERTLLDYRQRAGISSPELSRCLGVPVARIRTIEDGERPTLTADQIARWAHEIGISVAGWYQVHLQRESSDPRAHCASARDAFLGVSVTTAVTGSVNTAGHRPTSTLSGRPQSCTTKTRVHRTRRVCTPRLGGELVGVALRLLDPTPSTTSDGSDAEDRDLTPRTTDEWDEVNEVAKSLAGITNCSRMALHARHRRGEIAAWNRVIELPPDYAAAVDQLEATAPAMIAELTESRAELDPAITALNAHQTSPTSWSLPVPDDADRGVWAGRDHWLACAEDACDAARERDLRPLQASPHTTRALLRARADFFDVNGRGCTASAETIVTRAIERHGATIAVSTGLTRLRAINRVLTDAGLLTVHNYGRHLRRIERMAATTWHGHTQTRAGSVHPATDEHAVNCGNPESSTYSVAYGLLSPSGSRRGAHASAQARADTERLHQTRPKNGEKTAKSARRGRGAQSTVISLRARRIADDLTRHDTTNPLASGPYAHLCGARPSADGDKTPQMTVTALARLIDRLTPSWAGTRDVLAGLVHAATSPTTGYVALGLHTRPTNPIAWMTTVLSRIDWTHPDDFPAWWKVTEAHGLHCITPTSTGSGDQQEQEGAEHAMTTTPTPATASHGTPSPDTPVRLRGYRYRLSPNDRQQAALAQLAGASRVAYNTLVGHNLDAQRRRRALHDRLTADGVDDKVAWQQVKTAAKTDDTLQLTTSYQKAATTIIGPEITRHRDAAHRIAAGEAPDTVWPDTERYATPWLHTVPRRVLVSGLQDAAKAFRNYFDSLTGKRAGRPVGFPRFKRKGKARDSWTIPRPEAMGPKDAERGIYHRSVDGHAGPITDYHHIRLASLGVIRVESSTKRLSRALRRGAELRSFTISEAAGYWYVSLLAAEPDNRRVEPTRRQKDGGAVGIDLGVSKLMSFDNGTVIDNPRLLAQDDRRIARTQRKIDRAVPGSVGHDRLKRRLARHQHRLAARRKGLIHETTAALVDSTTLIAIEDLNVAGMTASARGTIDNPGKNVAAKAGLNRSILDASFGEIRRQLTYKAPEHGVDLVPVDRFFPSSQTCSQCGSKTKISLATRTYRCGTCGMILDRDVNAARNIINFALTTRANITTRRFTVIITVANTKGGVGKTTTTIYLAEAFARQGLNARVIDMDPQGSATRWYDYAVEAGEPAWTVENLTEYRLKQISDSERPTIIDCPPGDPRIFTVAVNLADIVVIPCKPSPDDYDRTQITYDTVPDGKAVVLVNDARLRTRALDQLVGDLDNPSDTTREPFQRFDTIVTHREHVVHANGTVPDRLNGFDDRNAHRDESPAPTSELLPKAKDDRVILGFRISEDKRRAFRTKATQEDTTVQAVLTEAVDRFLADDTVQPNKRAETTISIEGLPRPQQIVIIWSHNRTPDALAELTAGTRVIFAAKEDTLTQRTDDDETTGAVVTVLVAVGLFYDIITDDRDATDIYTSIEPRPLTFSGTVATVETVGKNRGITLVMPRHGQAQPIETRWPADIADSVADIRPGDEITVEAGERSLSWRVSIDDLGRRAVVPVVTATALATSTILS

SEQ ID NO: 3878 - protein, 1441 aa, Lichtheimia ramosa
MSCDTLARNPILYQNVPFHTLQTDRAQTGLPTVNNPMLYTSHANDNQDQFQYLAGFMADKPSIRDFMLRARADWNEMYRTDNMDPPDLPAIRNRKALVESLAKQMDTNFKTNVVTHFIARTQAFIAAAMTTIADIPDGWPELVDEIPLVPRQFNEMFYHTIIQGVNAANAQNFRQQIMTMQNQMNGEADVDLVESAVTFVNRLRNKRLHANIHNPINYIQVQEELREFAKRPREWPNHNALPLYILANIFYIPFLYADASVESIIDDNACREVHQLVLGLEPPVQREIKQFIRDLRLQLENAAYNWHIGIRVRPLNRNQADDSTSREIPIDIFDCLGLPRPSLIQRTQHLFVDVEPEDPHFARWEQNWNGHWITRLRESVEYFDRELLQLFARWDRANRLTGVRDNLQNNQVIEMEDLHVNVFEGEWEAAGVRLLNRQQRFQVMLDLLENFYQKTMNYIHGAIYDEICRWYSLWDASKSYMLELRDVLYDVHDDAVLQRIQRLNDIVEQYQQDIDRRWREEMDLYTRHVRQMDQALLQRYQQITNRIPNVLPRDENGEILDTPAVQAEYNFWRDILHERYLDFERFCVNIQEPVYNVMIDRTNNFYDALEDIQVAIHGILVLLEDDLEQAEENQEAQEDEDPMIVEEEEEEDRDMDQAQEESSNGFRSHALIPMLAMMLDRYPDQLSFRLCPMGQSGAIFIPVNSRIGKEILQNIDYFAQGLPNYEALGPEIRTLQDCVKLSRLTSISGNTFAIPLPTATRRTLHDIITESIARLMLPQHVAPLYDDLPNEVDITDLHQQMILMTREFGGGGLQDEDGNLIFNDNTRARVLYASQLYCNQMLIIRMLRIRTLLRCRIITLHVPGNDLNATWTPPLFDIDVNEWDRMLRAYNGYYNPHIGLDDFTQAYVHCYNRVFLERLITIAYNANNQIPLQVSTIGEYLDQWQSGNLAVTRNHLIRNWDPYAFLISPEYHSSVSIDGNVAIKHSKYYRDLHQTIPGVDNIVYPRYTIERLMTDGVQLKIVMRDWGRRSTRFTGNPVRYIPEVRKKRHRLLEESHLRPDQPVNIRNINNELNQRIDLLRQRGYRGVIGIDLGETYAAGAFYLPQDGGTGVQTTIKRNELYGRTRNNASMLEHETRRLGIDDITSQLSRGSTTSDLQSLNRYIQNFQVDNHGITLNNFYSRRSFLHRRNSNRLSMKSALDKACSRVLSMNHISTNAPDEEDHRRQIEAHREPLIAYNNVRMVPWEQGIALQRQILQQEQELEAQATQRRLQRIERRQNMTPQQREQRAFVRRMKRRRQRRRPRPSRIVVALGMDGMREGNQRRGALASMDLTFATKLNKIASSKGCLVVRCDEYMTSKMCPRCAMDNITTRMEYLTVPIPGTDQHRQSIRVLVCDRCQVWYHRDGAAAHNIANNSTAYLRYGQRVPINIRRSRRVQGFRYQ

SEQ ID NO: 3879 - protein, 1523 aa, Lichtheimia ramosa
MLQDIVAEPLLHAYLQSQGPPDAEVFNNLIQQFMGQVMENLNNLRNSVIHNGGRQLHICLVIDGDALPAKAPTHETRRARQNNAFHIATKHHNHRRRKGKKWFSFRRSARNWISFTPAIKDAIRHYLQTNGTGTYADTFLNVPHGQHRPAFSFHTAMFEADPEVVFLSQHVPENDLPAILSQDGDLFAYNGAIDVMRIVKIKWDIQQEYPGQITTKRHLFNELGLLSDTPAILQQSEVRFACLAATCGNDYAENVKLVSFVRIAKLLHDIGYQSQLVPAHDFLETLLSRFTSTVTWYQRFRFRVAVSQFCTPMVSDIIPGLQDGFHIGTPIAIENDMFYYLGVPGAPNPLAVQEPAHPQPEQPQQPEHHMQGPVLRLIPAMTDDQLLAIQGSLAQERWDGVPGAESSGDDNDTTGGGGPATGVFKAYNKTKDNVKRLLPKTYDPDRPTKKIKTHGQFGQATQTASSSKTSKQKSKKSKPRSSVIPPDETLDTDLMPTKIKFQVFDQDQNRHVPMSFKQNSRKITTMQAGLYSSVLGAAKFWNDVHRESLSGGQHITEQQSDAYAIAEAELWQKLISSIAKDMSYARFVALHILNIAQHVAYHSLDNETMLDFFRVFFTSDISELRSLWRFILYCGMDYQPATRGATKAEIRESQQHPYSDDITILAMDGSLLGDERINLHNLKAFEGDIVYLHLSKLMKVNPVIRNVFLLARKHWYLDCHEEMINRAPASVYRSQLLDVMVTNLINVYQLNVVKNFHWRYCRFIERLLKETARVPIGWPSNDDFIQQITNHVIQGGNTNFIDEIDGFATDGAREDAKQFVQQLIDRRGTSDPTSQDHVFNIHKCTQELINKATIPDQWPGPKDALVGYLFYRIWGVSLRSMEDAEDEAEEEEQIHNRVQQLPEAIRNDIDNFVQTQRGVQVAGIPIADTNIHVLLGVTGQPVELQTDEGELYTAGVSQHPREGMDHVDDDQEEEDEEYIGDITACSEDTGWLVPVMIHMLESCPEGLSFGVSPLAANHTIAIPFTVGALTDILNHMGYFTDPLINPFNIIADDNTKPDVERNQARQKAQSLLAARFRIEDRARAQSLSPPTLHPVHGFQAVTRQVGGIFRPNPPQPRNEQDIPRRYLEGLPKNKNVWDGAIDSIFDIRWRGEVVSVGGQQRVWKYKRNGYARMLRRRFFLDPNKPRYTTRRIFMSDGIRIWQMWNDWNTRARENQTPRYLKEIRRTSREDIQVAHGVDETANLLDYYCGVIGIDIGEVCTAASVFLPSDHTVNGSRMIVKRGYLYGRVIPNVQWLEKRRNTYYIHNIEDGLSLGSPRSSFANLTIYLAALKTDAAVIQLFDFYSARAVRRRLWDNHLSTRSAMDRACHLIMEQSTRTLHENVGYGPHRPTIFALGLDGLSRKSRKGALAPMDHKLSRHLFQRIRQQAHPASITITRIDEYLSSKTCCNCSMNGLNSRVQFLNYPATPYAPQRQSYRVVVCNTCHQRLHRDGNAAHNLALDTWCILRWRQRPHQRIRPSRRLQQ

SEQ ID NO: 3880 - protein, 762 aa, Lichtheimia ramosa
MSTTMTNQPFNPTVSRKNEKVPCDCGAEIVHYRRSHHACLYNIRNQQQSMDWSPDFYPEYFSVNIGLKTIIKSDELLLHIQDAVRRSNSIRFEASRLAYLYITQHVHDISNDTGFEGNPFQSNLYSHCQQAVSITTQQGRPNVATYLEAAWRCYYDIRGSSEWTSRSHITQILQYDANMMCENAKINIYYHFQTRLSRYLRLRISHVEDIVSRIGYKGIADLAEYVMNEVWKEDDDNDQEMTWRPIQSADQFFETINLDMTIAQRQSVFEVYTTIIQGIGEELMPLNTEKVEEHVEQVFKFHIKMLEFIEEVPAAVKQKSPASKVTKRWCSRKVANLHTKWGTEPILPSKQTIRIAECELYNCIQHKRPFEANQRLSDKLTKESLEKLSTKAANTISKIESNNFAPSTFTQSRFWNRLYSILPMTSFTTSHIMIDTVGLQQVSRSPKLEDVGAGASNLWEQFFDVSLLQGVSGVMKRFDHYITTDGVKASFKCVRPKRSITEDTITTTAITSRPIWGLDPGIRSIATLANNCSISESTCPPYSIKLSANQYHHLSFHHQSTNNLLQRMRHQPTVIEHQKKIGIHKTSKNESYIQYLQSIYEDGRWLQLLDFHQENREDNWRCFRYRQRTLAQFTNHIFDCSQGASNKKDVVIAYGDARLNHAMRSHKPVPVKRLPKVLSTQMTVKYVNEFRTSQICSQLCDDEYIPMDNAIDNESGDMIYAVKYCENCKIYWDRDANAARNILYRFLCEECFNDVDARFSRK

SEQ ID NO: 3881 - protein, 743 aa, Lichtheimia ramosa
MRRIGAAVIKGKRLKVITKLYERLQEVLNVSVSKESTSSTVPESDDDDDDFDPLYILGAEDEDGDDGDDQVSEETDKKESTAKTIRSLVAIIKRLLYSDQDGDAFTAEDVSKLAFKGTELSDEEARAAADIANFLNPFIPKKDALEDISVFNAIQIATITNTVVSLVQPQQKKWKLSPKSSQSRGLPLSAASLYQLLRKGYEIPSGDTGEFITNVNQARKSKEELFQAFFDVDKMKQFLKRRGLEPYWRLVYVDRWRVRVVGKKVVTRMVEIKLQKPSTSKKQHHGRRKKKKRKSSGSGVSKRKAEDDHDRKKRHKTEHDDKLKVLEKELKEVRSELSKERKEQTKLERIRADKGRQFRQGKKSGNWDGLLYAELQNARKEVNSHYLKMDSLKERSSQLSQQLYEMQRGVYLKDTKRETKQDEPRRKATNVIQDHVKGERRLGLTGTDPGIVTTATIALVSPQQQIDKIQKYATEQQPVEPTTSTSTKAPASHSSTERQQPAQQSQDQASKPVTAAVLNLTSSVLSDRVFSTVHRQQREWRKKKNIQTTDKKRAKQARTREIRSKRFYSKFGSRVRRKAVATDNTNKKQRSSVLHFYGSWTGRNSRIKGHSRQGSQQKMQQRMNCPENDHVLVIDEFNTTKTCGSCLHRVELQWQRQEDGTFRRCKGAVNCGNPRCPLRLDSNQTTKGRDSSGANNIALSGLSMLMSQDSKPLPVFQRGAYTTAYQLAEPFEPTNIIGASTGH

SEQ ID NO: 3882 - protein, 1943 aa, Lichtheimia ramosa
MEVIFLWVGWFGWVCAAEQDTIHSHVISFVSTDSSSRSCSRTMSAHEQASNEQPIHGVLTYKWAEYPVTLEVFPKNVADLKARCANAAEFNKVPGTNEVFKEQERRLREMGLRVEKAATDTHDCASTVLSMLNGSTKSAINLVVGNTALPVHGDQLVFAISNLAQVDIFYFSTRMQPRLISPQVPRLKPQSRPCIAVLHHVDSYAGTSQWFNICVDESKTNVPLKSQRTSSVIKSYPTPPAFSRSDTGSAKARKAYLKTDITNEQLTSTLETHLERHISNLYQQKVVDGDEKFDEFFQKQLKLKNLPSVKQAVYNDLFGDDTDKHPGASWLSKNVKKIDGYDAISRYRNIVTTFQHQQKELEEGLEKRASDSSSSSSSSGSSSGDDQDVSRQQEGNKKTIQETKIETATMSLKALLRTDVAFDDIQRILEEEKSRLAMDFQSLSTCVDKLVDMLSKGELNQLCGYDQPVSSEIDIKDVAKDFDFGEGVSTAIAVVPVQSNTSKYQDQKLFEYEHFSNLLSGCVANSVNEAKERSIYKEIRRLLIPKLDQSDKNHQQFWFNQAVSDMLTEFTTSFKKMWSRSRFERDLRVCLLGLLRVRLAPERLRRYIARRKQKSTATATATATATTATATATTATATATTATATATTTATATATATTTTTRYRKQTIRSIMRRIGAAVIKGKRLKVITKLYERLQEVLNVSVSKESTSSTVPESDDDDDFDPLYILGAEDEDGDDGDDQDSEEAEKIKESTAKTIRSLVAIIKRLLYSGKDGDAFTAEDVRKVAFKGTELSDEEARAAADIANFLNPFIPKKDALEDISVFNAIQIATITNTVVSLVQPQQKEWKLSPKSSQSRGLPLSAASLYQLLRKGYEIPSGDTGEFITNVNQARKSKEELFQAFFDVDKMKQFLKRRGLEPYWRLVYVDRWRVRVVGKKVVTRMVEIKLQKPSTSKKQHHGRRKKKKRKSSGSGVSKRKAEDDHDRKKRHKTEHDDKLKVLEKELKEVRSELSKERKEQTKLERIRADKGRQFRQGKKSGNWAGLLYAELQNARKEVNSHYLKMDSLKERSSQLSQQLYEMQRGVYLKDTKRETKQDEPRRKATNVIQDHVKGERRLGLTGTDPGIVTTATIALVSPQQQIDKIQKYATEQQPVEPTISTSTKAPASHSSTERQQPTQQSQDPSSKPVTAAVLNLTSNVLSDRVFSTVHRQQREWRKKKNIQTTDKKRAKQARTREIRSKRFYSKFGSRVRRKAVATDNTNKKQRSSVLHFYGSWTGRNSRIKGHSRQGSQQKMQQRMNCPENDHVLVIDEFNTTKTCGSCLHRVELQWQRQEDGTFRRCKGAVNCGNPRCPLRLDSNQTTKGRDSSGANNIAFVGRTQQHINLLNHLNQQTSLGPVLAIDGDHVPICGQNFGTSRIFLWLHFIDAPSLSHTHPFVMPALVTLDQPIGTSCTSDALTKLIQIVVRSRLGTHYVCGQDHGPGDLCCFALHHQGESFSLILNTQQKNGSLLERWILSVDSSKTPSIRHNDESTSGMMMKQQQQQQDNKDSGSHDMILLLQSVYSYTRMMPVHTMVMNNSMNKSELAITMRHSATGLSCFSHSPSPVEFSHDAHLQTHHFQPTFVNSIGTVSLEVVYAEKRTTTEPVVVTMRRLSRLSLSAMDMSEEDTSTNPNASPNNNPLASMPIPTPRMQYTRRSSIAYSTSPSSSLRGVSISNNSNNNNNNTGSFMFAALGNNSINNMLTANNNNNNNNSNPRRRCSLGGAESFVGSYEESLLSGRMSTVPSKPIVFQAQIGVLGHGDCTPKCPPHRTILFPAFFYESDASLPSPYVGTVELTKRYRVPAKGQLQIVIKNPNKTAVKLFLIPYDVLNMPPNTKTFLRQKSYAGGLRYAIHLQLCRTEKKRVYLYKHFRVVFANRISDARETLKVTCEGPFDYVPLTQADREFLSSK

SEQ ID NO: 3883 - protein, 222 aa, Lichtheimia ramosa
MKGYCKGFLYGKSIPNRDWLLNRKAHQDIEALESILSEGSTRSGFKSYTTYIKALREGNRGNMLFTFYSTTAVRPVTDAESNKSVLFGFGLDGIRKTARKGTRRSKDTTLANKLHAKIKQGNNHHTTRVCEYNTTKMCCHCVKRVKTTKTGYLQRIIPSNPNTMQQSFRVLVCYKCHHVKHRDGNAADNQAIILKQCCNTTNDHNTSFLLIVALLLHHNEHF

SEQ ID NO: 3884 - protein, 934 aa, Lichtheimia ramosa
MSCAILRTNQKKSTTSRKDPSLPLATCTQIRDAEYEDRLTRIIISTAIDKRARLKAELQQKQLPNGTNVNIVNRLAAQGVNTTCTALLATFPTEFTKERWVQFIQHNFDRIYNLHRQTPTPTKSKSSSSTYEEITVVQMPANRLLNVNLGEDERKIFKDLLVKAATNITDTIATVALAGRLHIINYAKTGLPVQKYSQQSQQYLPIKTLCPEAAVRDTSQLHDHKMIPVIPTHHRIAEFMERDKDIEEFLSMNHLSFILNNINNQQEKDKHTTWQACLKNIALSPSYIMNSNSHLKSSAVRQLATNVSNMWRKKDLYWRLLGHTSRLLIRLHLAPTREKRRYLKISGAKDYDHAQLIEQGVSAGDLNTTMDMTAKRHGLDQAEVNVINHLAKVIGPFASTKADHPVYTIPMIMLCVHLLSACGYSMFVQSIFPTISAASIHSIDLNQLTLYQITSERFIVPISDSAIMSSINDARDLPDRIFSAFFNMDYIENHDIKKSSIDTTCAPRIEWDDESGPIELKRLQNEKQKHQKKLRTLQQDIAKAKLDHRTTPMKSSHEEDTIHILKIARAHTYDVIDRLSNDISDLNIAKYASSKKKEANKQPDKDSKRLVVKYDTTGVAGARELDARELCKDVAFAGTDRGVVQMSVTVPVSIDRIQRHVDFFNGDFDAKDMTPEQDLQLIKVPKAYVMTAKGLDNECGTSRHMNKMRQWKEHSNDVALLERSIVSRNQLTMEGVNSYNKVYSDVKSRLRDFYFSRRCRAINRTKLYRTRRGYERAAVKERRYVMKSVPSKKVIHCIGDQGTGVGSRIRGHRRRGGKIFERLHGKYTTVAITDEFRTTKLCPYCFKTCVHPSYTKVLPGGKTISKRRLGASLCVNPNCPAKKFHYTTRPRDGQAALSIALVGASTMLNDDPQPLPPFNRVNTNKKKHKIANMP

SEQ ID NO: 3885 - protein, 267 aa, Lichtheimia ramosa
MNNILIPFDVASSGDASTKVDLTPIVFIGNDIVGGQQFYTQIEEDDLFEQLQQQQQQQHTQSLDAIEISIAEIESNLPPRRVASQHQYLIYLVQLLRFLPTLLQHYDDRYNILRWNAYQARQQVHDEIVNIFVNGGVKYAKSSQELVFKSRKWRQAPFSQSNKIPVIAFGSGRWKRQRGSLPGLAGVCFHVLKKAEREGKVVVAMVNEAYTSKVNVPVNSNAYTLHSALYCTQCQRVWNRDVMASKSIYEIGNELARHNTRPSHFKK

SEQ ID NO: 3886 - protein, 388 aa, Ursus thibetanus
MLVLKKAYKTEVLLTTDQQQKVHRTIGVCRYVYNLYLETAQNHYKETKKHLSGYDFSKWLNNIHTKQTDHWIKDVSSKAVKQAIMNGDRAFKNFFKGIAKFPRFKKKRNQDVKAYFPKNNPTDLTVERHRIKIPTFGWVRLKEFGYIPAGATATSCTISQKAGRYYVSVLCTVNKNRAVYESKSAGIGGDLGLHKFLVCSNHLVFENINKQQRTIKLEKQLKRAQRKLSRSYEQNKNRKRGEFCAENRQKQLIVVQKLHARLANIRKEYIRFVVSVLVKTKPAYVAIEDLNIKGMMKNRYLSRAIAGQRFYQFREWLIAKCLEIGIEVRLVNRWFPSSKLCSSCGDKNISLSLADRMFTCDNCGTEMDRDFNASLNLTYTKEYTVVTE

SEQ ID NO: 3887 - protein, 1002 aa, unidentified
  source 1..1002: note = Saccharomyces
MWWKSDDQSNWYAALEKSCRYLEGKGDEYGIRKVTQLAKAGSIQTASYGEENYIGGTSASPIVFRSNNGPREVEPDQLHDSFTAYWAPLLANDLSDLVNSTLSEMTAIEEPESPCYSIPNGVTPESCTPVKQVMFQTNVPFSYLNLTGENHFYMKEFYNEFSNVILPFQASSDGIMINPVRDILIIYARESHYLLYALLACGARSSHRKSSLPEDQSSYKLYLRRCLETLTAVMERDMMGSLDSILLTILVLTCDSASHTRQEWRAHLRGAKDLLSKNDTQKTHSMIFLLCKSWYSSIEILAGLVSPKGGTLRTGEELDLLICNRSEEVTTLRKLNIVSEEGFSLFHGYSMELVVIIKDLIKILRREGKSQQDYCAITELISSVRKQLDFELIDKSGIVPNTHPCYPKKINENDSSFSNNISVTYVDGRKLTLSWSDISHRSYALAALLTIFTKLLNIDKGNAFVQSMVKDLISTACCYDGAGGFLKSHCYFVLQWPMLVAGTNSIIEEHKARVETFFRLVAQLGSGSAGFALARLRRIWSNGPAAENETAVGIDMLSQQWGLDVKNSLAGERKGEKIESNSWFTIVKHKQVLITNDSLDLPLKVHIEKELTRARHIRLYPTTSQQETLRKWFGTQRYVYNRALKLHHEGQPMNIKTLRQMLINKDINILEPHEQWLKEYNYDLKSEALRDLVKNYSSNMARYKSTGTPFKLKFKSEKAKTQSLSVLKKYWNNKKSFYSDVFSSTKMRSAEKLPEQLLMDSRLQRTRHNHFYLIVPMVGEEIARDEGREKFIFIDPGVRTFLTGYDSGQNVVEIGKNAVVRTEKLKHRRRKLQSKLAKLKTHKKRQNHRKALHRLDEKISRILSDMHKKSALCLCKSYETVFIPKLNFHQCTKLNRKSRSSMATMAHCSFNDRVVMKAEQLRGTSVIVVEEDYTSKTCSKCGNIKKDLGSNKIYSCVSCFSVFDRDFNAAKNIMLKYCCEHLMTSDASSVPLPLVERVRGSP

SEQ ID NO: 3888 - protein, 589 aa, Gigaspora margarita
MFQISWAPPPPPPPPPPPPPPPLRQRVMSTHEFQVQSRRQTLSGNKSFSSLSVPNTNSSQTLEVVSTSRDPACAPYWNKQVAEWSQKLWLPTGTDYVDSHMISSNTFLNSMVQNSWFSHKMAPPMTKLNSVKISLPSTLSLSVECKESEQQDIDKNEKNSSRKRKKPLKSTRRSKRQKKTDLTRSLKIRVYPNSSQKTLLKQWMGCARLVYNMVVANFNHGHLSTRQYWFRSLLKLKMLHEWNFMKGCPYEVLDHAITHAIQARDEVICRNNELNSDKHHLHFQRKKNNQQTITIRSKSCCKSGSLKFYVRSLHNNQITMSINRHKDNNPLFFPLHHEQRRKNHNWPNLEGKVKMDSKLMFNRKLGYWTFVWVYGKNVENCNDIQVAENLNIVAIDPGVRTGWSWYSPSKGCGWFGNLDINRVFRLSLFLDDLISRTTQAPPKKRNSMKRAQARLQCRIQNLVEECHKKVTLWFLTNFDVIIIPPFNGSAMSHRLNRKINSKTVRKMLTWSHSRFRKRLIFKAEELGKKVIIQNEAYTSKTCSCCGFIKHNLGGSKVFRCNECRVVIDRDFNGARGIFLRALLDGAVCI

SEQ ID NO: 3889 - protein, 544 aa, Gigaspora margarita
MIPQPPPLLKRKVSYTHVSQVTKKKKTFKDRNRSLNPDSRIISSSMMSGQVSTSKETGLRPYWNDQVKEWSQKLWLPTVTDSANSDLTSLNLCSYHTPQNSWFSSTNKVPTNMNYHKISLQSTPSLSVEHKKEKTKTIKARSKKKQKIETTVNRTLSIKTYPNHSQKKILKRWLGLMRYAYNTVVRWNKNRRFCNSSKNFEWIKPHTLNEKLKLYIDVKEGKDLNEKDKKLQRSCVWGERKFLRTVAWLELRLKGLHDKVPANIIDESIDDALTARKNIIQKNLKETKKSSLSFKSKKDLRQTMTIRMQNFSKKDWNHFYVTQLHSSLTLLSKRCKPNKLESGKRDLRPFHFEKKRKHNKWPLQKIDXVRTPFTWYSSTKGVGKIGEYDIGRIFRLCKHMDNLISKKDRLTSSISKRKKKKALRVDKAIFHEFDMIIIPPFEVSDMVNRKSRKITRKTVRKMLCWSHYKFRQRLISKAEEKGIHVVIQNEAYTSKTCSWCGNIQNIGGSEMYNCKNCGIKIDRDVNGARGIFLRALLDGAMILS

SEQ ID NO: 3890 - protein, 348 aa, Gigaspora margarita
MDSDQLRTGKDEEKLKTRKIRMYPTSEEREKLRKWMGTVRWTYNKVLEMLQDDKISNMNIIRKHYLNDECFANEELSWVKETPREVRNRGEYAFLKTVIVSERPPEINHTVNVTMNRLGHFYMCVSIPLDVSDNQDGVKGKVISLDPGVRTFMTGYDPNGRVVEWGNGDLNKIFRLSKRYDKLQKDKDLAIGRKNKRKRYKLKIKMYRIIVRIRNLINECHHQLARWLCENYEIILIPIFETSNMVLKNKRKIRSKTARMMLTWSHYRFRMFLHHKAREFVSCKVIKCTEEYTSKTCGNCGSINKKLGGSKIFRCDSCSLEIDRDMNGARNSLLKRITEGQVNPDFGT

SEQ ID NO: 3891 - protein, 393 aa, Gigaspora margarita
MDSDQLRTGNDEEKLKTRKIRMYPTSEEREKLRKWMGTVRWTYNKVLEMLQDDKISNMNIIRKHYLNDECFANEELSWVKETPREVRSYVIRQLMSTFKTSKKLHGNNFRMKYKTKKDRLQTISILARDWNRNRGEYAFLKTVIVSERPPEINHTVNVTMNRLGHFYMCVSIPLDVSDNQDGVKGKVISLDPGVRTFMTGYDPNGRVVEWGNGDLNKIFRLSKRYDKLQKDKDLAIGRKNKRKRYKLKIKMYRIIVRIRNLINECHHQLARWLCENYEIILIPIFETSNMVLKNKRKIRSKTARMMLTWSHYRFRMFLHHKAREFVSCKVIXCTEEYTSKTCGNCGSINKKLGGSKIFRCDSCSLEIDRDMNGARNXLLKRITEGQVNPDFGT

SEQ ID NO: 3892 - protein, 303 aa, Gigaspora margarita
MTIRAQNFSKKDWNHFYVTHLHNSSTLLSKRCKPNDFEGGKRDLCPFHFEKKRKHNKWPSQRIDCDCKLTYLHKTNEWIFYWVYEAQKQIRETQADVHVVSIDPGVRTXFTWYSSTKGAGKIGEYDIGRIFRLCKHMDDLISKKDRLASSISKRKKKKALRVDKAIFRMKRKIRRLQEEIHRKTIKFLTDEFDMIIIPSFEVSNMVNRKTRKITRKTVRKMLCWSHYKFRQRLISKAEEKGINVIIQNEAYTSKTCSWCGNIQNIGGSETYKCKNCNIKIDRDVNGARGIFLRALLDGAMILS

SEQ ID NO: 3893 - protein, 588 aa, Gigaspora margarita
MFQISWAPPPPPPPPPPPPLRQRVMSTHEFQVQSRRQTLSGNKSFSSLSVPNTNSSQTLEVVSTSRDPACAPYWNKQVAEWSQKLWLPTGTDYVDSHMISSNTFLNSMVQNSWFSHKMAPPMTKLNSVKISLPSTLSLSVECKESEQQDIDKNEKNSSRKRKKPLKSTRRSKRQKKTDLTRSLKIRVYPNSSQKTLLKQWMGCARLVYNMVVANFNHGHLSTRQYWFRSLLKLKMLHEWNFMKGCPYEVLDHAITHAIQARDEVICRNNELNSDKHHLHFQRKKNNQQTITIRSKSCCKSGSLKFYVRSLHNNQITMSINRHKDNNPLFFPLHHEQRRKNHNWPNLEGKVKMDSKLMFNRKLGYWTFVWVYGKNVENCNDIQVAENLNIVAIDPGVRTGWSWYSPSKGCGWFGNLDINRVFRLSLFLDDLISRYANYQAPPKKRNSMKRAQARLQCRIQNLVEECHKKVTLWFLTNFDVIIIPPFNGSAMSHRLNRKINSKTVRKMLTWSHSRFRKRLIFKAEELGKKVIIQNEAYTSKTCSCCGFIKHNLGGSKVFRCNECXVVIDRDFNGARGIFLRALLDGAVCI

SEQ ID NO: 3894 - protein, 623 aa, Gigaspora margarita
MFLTATQASSTLGVSSCTLRRWHRKGKIAAFHSPGGVRLYDVSNIVGSTTTTTTSSSSSSTPKSYVYARVSSSKQKADLERQQEFILTKCPQHELVSDIGSGINFKRPGLRTILEQASRRMVAEVVVAHRDRLCRFAYDLIEYILKLNGAKLVVLSQDGSSNDETELCQDILAINTVFVCRMQGKRAARYRQERKKQQQKTQETIEINSPLKTPKEDRSNSIPKDQSVPEFLTENIVETMDGLVYNMVVANFNHGHLSTRQYWFRSLLKLKMLHEWNFMKGCPYEVLDHAITHAIQARDEVICRNNELNSDKHHLHFQRKKDNQQTITIRSKSCCKSGSLKFYVRSLHNNQITMSINRHKDNNPLFFPLHHEQRRKNHNWPNLEGKVKMDSKLMFNRKLRYWTFVWVYGKNVENCNDIQVAENLNIVAIDPGVRTGWSWYSPSKGCGWFGNLDINRVFRLSLFLDDLISRTTQAPPKKRNSMKRAQARLQRRIQNLVEECHKKVTLWFLTNFDVIIIPPFNGSAMSHRLNRKINSKTVRKMLTWSHSRFRKRLIFKAEELGKKVIIQNEAYTSKTCSCCGFIKHNLGGSKVFRCNECGVVIDRDFNGARGIFLRALLDGAVCI

SEQ ID NO: 3895 - protein, 661 aa, Gigaspora margarita
MFLMYLSARKTTKKFGVSSDTLRLWLRQGKISAITSPSGTHLYDISSFLLELITQNDTSTTAVTEKKVSYTHVSQVTKKKKTFKDRNRSLNPDSRIISSSMMSGQVSTSKETGLRPYWNDQVKEWSQKLWLPTVTDSANSDLTSLNLCSYHTLQNSWFSSTNKVPTNMNYHKISLQSTPSLSVEHKKEKTKTIKARSKKKQKIETTVNRTLSIKTYPNHSQKKILKRWLGLMRYANNTVVRWNKNRRFCNSSKNFEWIKPHTLNEKLKLYIDVKEGKDLNKKDKKLQRSCVWGERKFLRTVAWLELRLKGLHDKVPANIIDESIDDALKARKNIIQKNLKETKKSSLSFKSKKDLRQTMTIRMQNFSKKDWNHFYVTQLHSSLTLLSKRCKPNKLESGKRDLRPFHFEKKRKHNKWPLQKIDCDCKLTYLRKTNEWIFHWVYEAQKQICETQADVHVIAIDPGVRTPFTWYSSTKGVGKIGEYDIGRIFRLCKHMDNLISKKDRLTSSISKRKKKKALRVDKAIFRMKRKINQLRDEVHRKTIKFLTDEFDMIIIPPFEVSDMVNRKSRKITRKTVRKMLCWSHYKFRQRLISKAEEKGIHVVIQNEAYTSKTCSWCGNIQNIGGSEMYNCKNCGIKIDRDVNGARGIFLRALLDGAMILS

SEQ ID NO: 3896 - protein, 1256 aa, Gigaspora margarita
MFLTATQASSTLGVSXCTLRRWHRKGKIAAFHSPGGVRLYDVSNIVGSTTTTTTTSSSSSSSTPKSYVYARVSSSKQKADLERQQEFLLTKCPQHELVSDIGSGINFKRPGLRTILEQASRRMVAEVVVAHRDRLCRFAYDLIEYILKLNGAKLVVLSQDGSSNDETELCQDILAINTVFVCRMQGKRAARYRQERKKQQQKTQETIEINSPLKTPKEDRSNSIPKDQSVPEFLTENIVETMDGLVYNMVVANFNHGHLSTRQYWFRSLLKLKMLHEWNFMKGCPYEVLDHAITHAIQARDEVICRNNELNSDKHHLHFQRKKNNQQTITIRSKSCCKSGSLKFYVRSLHNNQITMSINRHKDNNPLFFPLHHEQRRKNHNWPNLEGKVKMDSKLMFNRKLGYWTFVWVYGKNVENCNDIQVAENLNIVAIDPGVRTGWSWYSPSKGCGWFGNLDINRVFRLSLFLDDLISRTTQAPPKKRNSMKRAQARLRCRIQNLVEECHKKVTLWFLTNFDVIIIPPFNGSAMSHRLNRKINSKTVRKMLTWSHSRFRKRLIFKAEELGKKVIIQNEAYTSKTCSCCGFIKHNLGGSKVFRCLGESEKETGAVRANNPIPPYCKLFYFEVDIIDEGKNKIIGIGFCENGVDLNRMPGWDDGSWGYHGDDGQLFGSSVSDNPYGPLFSTGDTIGCCLNFKNNTVFYTKNGVNLGIAFRNLKGTLYPCVGLRSQGGSIEVNFGSRKFKFAATTSNDMDDELLKNKLIEAFNMCINTTKIYILEDLENSLKIKQDDALKFRGKFNFIMGSYEDAIIDLTKLLDIEPDNKFALRYRAEAYYQMEKYEEAIIDLTKLLDIEPNSKFALSYLGEAYHLTKEVIIDLAKLLDLENLLEIKQDSALKFRAKFNFIMRRYEDAIVDLTKLLDIEPNNKFALRYRAEAYYLMEKYKESFNDVNKLPNIDTSDEWASKLLAKIIEKYRGEAYHLTERYKDAIIDLTKLLGNDPNDDVDELLREEWIEAFNMCNNTTNTYTLEDLENSLKIDQDSALKFRVKFNFIMGSYEDAIIDLTKLLDIEPNNKFALRYRAEAYYLMEKYKESFNDVNKLPNIDTSDEWASKLLAKIIENPCVDETYELGYFYLHGINVEKDEYKAFAQFEKSANKGYTEGINYLGCCYEYGIGVEKDENKAFTYYQKSADMNNSNGMYQVGYCYYLGIGVEIDKHKAFTYYLKSAEAGNSMGIWKTAVCYYYGIGVEKNDDKFSEWDKK

SEQ ID NO: 3897 - protein, 626 aa, Gigaspora margarita
MFLTATQASSTLGVSSCTLRRWHRKGKIAAFHSPGGVRLYDVSNIVGSTTTTTTSSSSSSSSSTPKSYVYARVSSSKQKADLERQQEFLLTKCPQHELVSDIGSGINFKRPGLRTILEQASRRMVAEVVVAHRDRLCRFAYDLIEYILKLNGAKLVVLSQDGSSNDETELCQDILAINTVFVCRMQGKRAARYRQERKKQQQKTQETIEINSPLKTPKEDRSNSIPKDQSVPEFLTENIVETMDGLVYNMVVANFNHGHLSTRQYWFRSLLKLKMLHEWNFMKGCPYEVLDHAITHAIQARDEAICRNNELNSDKHHLHFQRKKNNQQTITIRSKSCCKSGSLKFYVRSLHNNQITMSINCHKDNNPLFFPLHHEQRRKNHNWLNLEGKVKMDSKLMFNRKLEYWTFVWVYGKNVENCNDIQVAENLNIVAIDPGVCTGWSWYSPSKGCGWFGNLDINRVFRLSLFLDDLISRTTQAPPKKRNSMKRAQARLQCRIQNLVEECHKKVTLWFLTNFDVIIIPPFNGSAMSHRLNRKINSKTVRKMLTWSHSRFRKRLIFKAEELGKKVIIQNEAYTSKTCSCCGFIKHNLGGSKVFRCNECRVVIDRDFNGARGIFLRALLDGAVCI

SEQ ID NO: 3898 - protein, 276 aa, Gigaspora margarita
MNIRAQNFSKKDWNHFYVTHLHSSLTLLSKRCKSNKLESGKRDLRPFHFEKKRKHNKWPLQKIDCDCKLTYLRKTNEWIFHWVYEAQKQIRETQADVHVVSIDPGVRTPFTWYSSTKDRLASSISKRKKKKALRVDKAIFRIKRKIKRLQDEVHRKTIKFLTDEFDMIIIPPFEVSNMVNRKSRKITRKTVRKMLCWSHYKFRQRLISKAEEKGIHVVIQNEAYTSKTCSWCGNIQNIGGSEMYNCKNCGIKIDRDVNGARGIFLRALLDGAMILS

SEQ ID NO: 3899 - protein, 606 aa, Gigaspora margarita
MIPQPPPLLKRKVSYTHVSQVTKKKKTFKDRNRSLNPDSRIISSSMMSGQVSTSKETGLRPYWNDQVKEWSQKLWLPTVTDSANSDLTSLNLCSYHTLQNSWFSSTDKVPTNMNYHKISLQSTPSLSVEHKKEKTKTIKARSKKKQKIETTVNRTLSIKTYPNHSQKKILKRWLGLMRYAYNTVVRWNKNRRFCNSSKNFEWIKPHTLNEKLKLYIDVKEGKDLNEKDKKLQRSCVWGERKFLRTVAWLELRLKGLHDKVPANIIDESIDDALKARKNIIQKNLKETKKSSLSFKSKKDLRQTMTIRMQNFSKKDWNHFYVTQLHSSLTLLSKRCKSNKLESGKRDLRPFHFEKKRKHNKWPLQKIDCDCKLTYLRKTNEWIFHWVYEAQKQIRETQADVHVIAIDPGVRTPFTWYSSTKGVGKIGEYDIGRIFRLCKHMDNLISKKDRLTSSISKRKKKKALRVDKAIFRMKRKINQLRDEVHRKTIKFLTDEFDMIIIPPFEVSNMVNRKSRKITRKTVRKMLCWSHYKFRQRLISKAEEKGIHVVIQNEAYTSKTCSWCGNIQNIGGSEMYNCKNCGIKIDRDVNGARGIFLRALLDGAMILS

SEQ ID NO: 3900 - protein, 612 aa, Gigaspora margarita
MFQISWAPPPPPPPPPPPXXXXXXXXXXXXXXXXXXXXXXXXSSSSSSSTPKSYVYARVSSSKQKADLERQQEFLLTKCPQHELVSDIGSGINFKRPGLRTILEQASRRMVAEVVVAHRDRLCRFAYDLIEYILKLNGAKLVVLSQDGSSNDETELCQDILAINTVFVCRMQGKRAARYRQERKKQQQKTQETIEINSPLKTPKEDRSNSIPKDQSVPEFLTENIVETMDGLVYNMVVANFNHGHLSTRQYWFRSLLKLKMLHEWNFMKGCPYEVLDHAITHAIQARDEVICRNNELNSDKHHLHFQRKKDNQQTITIRSKSCCKSGSLKFYVRSLHNNQITMSINRYKDNNPLFFPLHHEQRRKNHNWPNLEGKVKMDSKLMFNRKLGYWTFVWVYGKNVENCNDIQVAENLNIVAIDPGVRTGWSWYSLSKGCGWFGNLDINRVFRLSLFLDDLISRTTQAPPKKRNSMKRAQARLQRRIQNLVEECHKKVTLWFLTNFDVIIIPPFNGSAMSHRLNRKINSKTVRKMLTWSHSRFRKRLIFKAEELGKKVIIQNEAYTSKTCSCCGFIKHNLGGSKMFRCNECGVVIDRDFNGARGIFLRALLDGAVCI

SEQ ID NO: 3901 - protein, 694 aa, Gigaspora margarita
MFLTATQASSTLGVSSCTLRRWHRKGKIAAFHSPGGVRLYDVSNIVGSTTTTSSSSSSSSTPKSYVYARVSSSKQKADLERQQEFILTKCPQHELVSDIGSGINFKRPGLRTILEQASRRMVAEVVVAHRDRLCRFAYDLIEYILKLNGAKLVVLSQDGSSNDETELCQDILAINTVFVCRMQGKRAARYRQERKKQQQKTQETIEINSPLKTPKEDRSNSIPKDQSVPEFLTENIVETMDGLVYNMVVANFNHGHLSTRQYWFRSLLKLKMLHEWNFMKGCPYEVLDHAITHAIQARDEVICRNNELNSDKHHLHFQRKKDNQQTITIRSKSCCKSGSLKFYVRSLHNNQITMSINRHKDNNPLFFPLHHEQRRKNHNWPNLEGKVKMDSKLMFNRKLRYWTFVWVYGKNVENCNDIQVAENLNIVAIDPGVRTGWSWYSPSKGCGWFGNLDINRVFRLSLFLDDLISRTTQAPPKKRNSMKRAQARLQRRIQNLVEECHKKVTLWFLTNFDVIIIPPFNGSAMSHRLNRKINSKTVRKMLTWSHSRFRKRLIFKAEELGKKVIIQNEAYTSKTCSCCGFIKHNLGGSKVFRCNECGVVIDRDFNGARGIFLRALLDGAVFVMSTNIFSYKAGETRVFNTSRDNIRLKVEGLNEDVAGVILVDENESPINVTKKVEFINKATKNRISVKGQKS

SEQ ID NO: 3902 - protein, 628 aa, Gigaspora margarita
MFLTATQAXSTLGVSSCTLRRWHRKGKIAAFHSPGGVRLYDVSNIVGSTTTTTTTTTSSSSSSSSTPKSYVYARVSSSKQKADLERQQEFLLTKSPQHELVSDIGSGINFKRPGLRTILEQASRRMVAEVVVAHRDRLCRFAYDLIEYILKLNGAKLVVLSQDGSSNDETELCQDILAINTVFVCRMQGKRAARYRQERKKQQQKTQETIEINSPLKTPKEDRSNSIPKDQSVPEFLTENIVETMDGLVYNMVVANFNHGHLSTRQYWFRSLLKLKMLHEWNFMKGCPYEVLDHAITHAIQARDEVICRNNELNSDKHHLHFQRKKNNQQTITIRSKSCCKSGSLKFYVRSLHNNQITMSINRHKDNNPLFFPLHHEQRRKNHNWPNLEGKVKMDSKLMFNRKLGYWTFVWVYGKNVENCNDIQVAENLNIVAIDPGVRTGWSWYSPSKGCGWFGNLDINRVFRLSLFLDDLISRTTQAPPKKRNSMKRAQARLQCRIQNLVEECHKKVTLWFLTNFDVIIIPPFNGSAMSHRLNRKINSKTVRKMLTWSHSRFRKRLIFKAEELGKKVIIQNEAYTSKTCSCCGFIKHNLGGSKVFRCNECRVVIDRDFNGARGIFLRALLDGAVCI

SEQ ID NO: 3903 - protein, 598 aa, Gigaspora margarita
MIPQPPPLLKRKVSYTHVSQVTKKKKTFKDRNRSLNPDSRIISSSMMSGQVSTSKETGLRPYWNDQVKEWSQKLWLPTVTDSANSDLTSLNLCSYHTLQNSWFSSTNKVPTNMNYHKISLQSTPSLSVEHKKEKTKTIKARSKKKQKIETTMNRTLSIKTYPNHSQKKILKRWLGLMRYAYNTVVRWNKNRRFCNSSKNFEWIKPHTLNEKLKLYIDVKDKKLQRSCVWGERKFLRTVAWLELRLKGLHDKVPANIIDESIDDALKARKNIIQKNLKETKKSSLSFKSKKDLRQTMTIRMQNFSKKDWNHFYVTQLHSSLTLLSKRCKSNKLESGKRDLRPFHFEKKRKHNKWPLQKIDCDCKLTYLRKTNEWIFHWVYEAQKQIRETQADVHVIAIDPGVRTPFTWYSSTKGVGKIGEYDIGRIFRLCKHMDNLISKKDRLTSSISKRKKKKALRVDKAIFRMKRKINQLRDEVHRKTIKFLTDEFDMIIIPPFEVSDMVNRKSRKITRKTVRKMLCWSHYKFRQRLISKAEEKGIHVVIQNEAYTSKTCSWCGNIQNIGGSEMYNCKNCGIKIDRDVNGARGIFLRALLDGAMILS

SEQ ID NO: 3904 - protein, 623 aa, Gigaspora margarita
MFLTATQASSTLGVSSCTLRRWHRKGKIAAFHSPGGVRLYDVSNIVGSTTTTTSSSSSSSTPKSYVYARVSSSKQKADLERQQEFILTKCPQHELVSDIGSGINFKRPGLRTILEQASRRMVAEVVVAHRDRLCRFAYDLIEYILKLNGAKLVVLSQDGSSNDETELCQDILAINTVFVCRMQGKRAARYRQERKKQQQKTQETIEINSPLKTPKEDRSNSIPKDQSVPEFLTENIVETMDGLVYNMVVANFNHGHLSTRQYWFRSLLKLKMLHEWNFMKGCPYEVLDHAITHAIQARDEVICRNNELNSDKHHLHFQRKKDNQQTITIRSKSCCKSGSLKFYVRSLHNNQITMSINRHKDNNPLFFPLHHEQRRKNHNWPNLEGKVKMDSKLMFNRKLRYWTFVWVYGKNVENCNDIQVAENLNIVAIDPGVRTGWSWYSPSKGCGWFGNLDINRVFRLSLFLDDLISRTTQAPPKKRNSMKRAQARLQRRIQNLVEECHKKVTLWFLTNFDVIIIPPFNGSAMSHRLNRKINSKTVRKMLTWSHSRFRKRLIFKAEELGKKVIIQNEAYTSKTCSCCGFIKHNLGGSKVFRCNECGVVIDRDFNGARGIFLRALLDGAVCI

SEQ ID NO: 3905 - protein, 625 aa, Gigaspora margarita
MFLTATQASSTLGVSSCTLRSWHRKGKIAAFHSPGGVRLYDVSNIVGSTTTTTSSSSSSSSSTPKSYVYARVSSSKQKADLERQQEFLLTKCPQHELVSDIGSGINFKRPGLRTILEQASRRMVAEVVVAHRDRLCRFAYDLIEYILKLNGAKLVVLSQDGSSNDETELCQDILAINTVFVCRMQGKRAARYRQERKKQQQKTQETIEINSPLKTPKEDRSNSIPKDQSVPEFLTENIVETMDGLVYNMVVANFNHGHLSTRQYWFRSLLKLKMLHEWNFMKGCPYEVLDHAITHAIQARDEVICRNNELNSDKHHLHFQRKKNNQQTITIRSKSCCKSGSLKFYVRSLHNNQITMSINRHKDNNPLFFPLHHEQRRKNHNWPNLEGKVKMDSKLMFNRKLGYWTFVWVYGKNVENCNDIQVAENLNIVAIDPGVRTGWSWYSPSKGCGWFGNLDINRVFRLSLFLDDLISRTTQAPPKKRNSMKRAQARLQCRIQNLVEECHKKVTLWFLTNFDVIIIPPFNGSAMSHRLNRKINSKTVRKMLTWSHSRFRKRLIFKAEELGKKVIIQNEAYTSKTCSCCGFIKHNLGGSKVFRCNECRVVIDRDFNGARGIFLRALLDGAVCI

SEQ ID NO: 3906 - protein, 588 aa, Gigaspora margarita
MFQISWAPPPPPPPPPPPPPPLRQRVMSTHEFQVQSRRQTLSGNKSFSSLSVPNTNSSQTLEVVSTSRDPACAPYWNKQVAEWSQKLWLPTGTDYVDSHMISSNTFLNSMVQNSWFSHKMAPPMTKLNSVKISLPSTLSLSVECKESEQQDIDKNEKNSSRKRKKPLKSTRRSKRQKKTDLTRSLKIRVYPNSSQKTLLKQWMGCARLVYNMVVANFNHGHLSTRQYWFRSLLKLKMLHEWNFMKGCPYEVLDHAITHAIQARDEVICRNNELNSDKHHLHFQRKKNNQQTITIRSKSCCKSGSLKFYVRSLHNNQITMSINRHKDNNPLFFPLHHEQRRKNHNWPNLEGKVKMDSKLMFNRKLGYWTFVWVYGKNVENCNDIQVAENLNIVAIDPGVRTGWSWYSPSKGCGWFGNLDINRVFRLSLFLDDLISRTTQAPPKKRNSMKRAQARLQCRIQNLVEECHKKVTLWFLTNFDVIIIPPFNGSAMSHRLNRKINSKTVRKMLTWSHSRFQKRLIFKAEELGKKVIIQNEAYTSKTCSCCGFIKHNLGRSKVFRCNECRVVIDRDFNGARGIFLRALLDGAVCI

SEQ ID NO: 3907 - protein, 640 aa, Gigaspora margarita
MFLTATQASSTLGVSXCTLRRWHRKGKIAAFHSPGGVRLYDVSNIVGSTTTTTTTSSSSSSTPKSYVYARVSSSKQKADLERQQEFLLTKCPQHELVSDIGSGINFKRPGLRTILEQASRRMVAEVVVAHRDRLCRFAYDLIEYILKLNGAKLVVLSQDGSSNDETELCQDILAINTVFVCRMQGKRAARYRQERKKQQQKTQETIEINSPLKTPKEDRSNSIPKDQSVPEFLTENIVETMDGLVYNMVVANFNHGHLSTRQYWFRSLLKLKMLHEWNFMKGCPYEVLDHAITHAIQARDEVICRNNELNSDKHHLHFQRKKNNQQTITIRSKSCCKSGSLKFYVRSLHNNQITMSINRHKDNNPLFFPLHHEQRRKNHNWPNLEGKVKMDSKLMFNRKLGYWTFVWVYGKNVENCNDIQVAENLNIVAIDPGVRTGWSWYSPSKGCGWFGNLDINRVFRLSLFLDDLISRTTQAPPKKRNSMKRAQARLQCRIQNLVEECHKKVTLWFLTNFDVIIIPPFNGSAMSHRLNRKINSKTVRKMLTWSHSRFRKRLIFKAEELGKKVIIQNEAYTSKTCSCCGFIKHNLGGSKVFRCNECRVVIDRDFNGARGIFLRALLDGAESETDKSEALEDLLSDTDG

SEQ ID NO: 3908 - protein, 626 aa, Gigaspora margarita
MFLTATQASSTLGVSLCTLRRWHRKGKIAAFHSPGGVRLYDVSNIVGSTTTTTTSSSSSSSSSTPKSYVYARVSSSKQKADLERQQEFLLTKCPQHELVSDIGSGINFKRPGLRTILEQASRRMVAEVVVAHRDRLCRFAYDLIEYILKLNGAKLVVLSQDGSSNDETELCQDILAINTVFVCRMQGKRAARYRQERKKQQQKTQETIEINSPLKTPKEDRSNSIPKDQSVPEFLTENIVETMDGLVYNMVVANFNHGHLSTRQYWFRSLLKLKMLHEWNFMKGCPYEVLDHAITHAIQARDEVICRNNELNSDKHHLHFQRKKNNQQTITIRSKSCCKSGSLKFYVRSLHNNQITMSINRHKDNNPLFFPLHHEQRRKNHNWPNLEGKVKMDSKLMFNRKLGYWTFVWVYGKNVENCNDIQVAENLNIVAIDPGVRTGWSWYSPSKGCGWFGNLDINRVFRLSLFLDDLISRTTQAPPKKRNSMKRAQARLQCRIRNLVEECHKKVTLWFLTNFDVIIIPPFNGSAMSHRLNRKINSKTVRKMLTWSHSRFRKRLIFKAEELGKKVIIQNEAYTSKTCSCCGFIKHNLGGSKVFRCNECRVVIDRDFNGARGIFLRALLDGAVCI

SEQ ID NO: 3909 - protein, 626 aa, Gigaspora margarita
MFLTATQASSTLGVSSCTLRRWHRKGKIAAFHSPGGVRLYDVSNIVGSTTTTTSSSSSSSSSSTPKSYVYARVSSSKQKADLERQQEFLLTKCPQHELVSDIGSGINFKRPGLRTILEQASRRMVAEVVVAHRDRLCRFAYDLIEYILKLNGAKLVVLSQDGSSNDETELCQDILAINTVFVCRMQGKRAARYRQERKKQQQKTQETIEINSPLKMPKEDRSNSIPKDQSVPEFLTENIVETMDGLVYNMVVANFNHGHLSTRQYWFRSLLKLKMLHEWNFMKGCPYEVLDHAITHAIQARDEVICRNNELNSDKHHLHFQRKKNNQQTITIRSKSCCKSGSLKFYVRSLHNNQITMSINRHKDNNPLFFPLHHEQRRKNHNWPNLEGKVKMDSKLMFNRKLGYWTFVWVYGKNVENCNDIQVAENLNIVAIDPGVRTGWSWYSPSKGCGWFGNLDINRVFRLSLFLDDLISRTTQAPPKKRNSMKRAQARLRCRIQNLVEECHKKVTLWFLTNFDVIIIPPFNGSAMSHHLNRKINSKTVRKMLTWSHSRFRKRLIFKAEELGKKVIIQNEAYTSKTCSCCGFIKHNLGGSKVFRCNECRVVIDRDFNGARGIFLRALLDGAVCI

SEQ ID NO: 3910 - protein, 624 aa, Gigaspora margarita
MFLTATQASSTLGVSSCTLRRWHRKGKIAAFHSPGGVRLYDVSNIVGSTTTTTTTTSSSSSTPKSYVYARVSSSKQKADLERQQEFLLTKCPQHELVSDIGSGINFKRPGLRTILEQASRRMVAEVVVAHRDRLCRFAYDLIEYILKLNGAKLVVLSQDGSSNDETELCQDILAINTVFVCRMQGKRAARYRQERKKQQQKTQETIEINSPLKTPKEDRSNSIPKDQSVPEFLTENIVETMDGLVYNMVVANFNHGHLSTRQYWFRSLLKLKMLHEWNFMKGCPYEVLDHAITHAIQARDEVICRNNELNSDKHHLHFQRKKNNQQTITIRSKSCCKSGSLKFYVRSLHNNQITMSINRHKDNNPLFFPLHHEQRRKNHNWPNLEGKVKMDSKLMFNRKLGYWTFVWVYGKNVENCNDIQVAENLNIVAIDPGVRTGWSWYSPSKGCGWFGNLDINRVFRLSLFLDDLISRTTQAPPKKRNSMKRAQARLQCRIQNLVEECHKKVTLWFLTNFDVIIIPPFNGSAMSHRLNRKINSKTVRKMLTWSHSRFRKRLIFKAEELGKKVIIQNEAYTSKTCSCCGFIKHNLGGSKVFRCNECRVVIDRDFNGARGIFLRALLDGAVCI

SEQ ID NO: 3911 - protein, 538 aa, Gigaspora margarita
MSTTKYRGAQEIRKTYEVSSETLRRWNNQGKISSIRTSGGKRLYSVTDLEKIFQEKVNEKKKICYARVSSDKQKEDLDRQCEHLMEKYPDHELIKDIGSGLNWKRKGFTSILERSFQGDIDEVVVARKDRLCRFAYELVEWIFDTMDSDQLRTGNEEEKLKTRKIRMYPTSEEREKLRKWMGTVRWTYNKVLEMLQDDKISNMNIIRKHYLNDECFANEELSWVKETPREVRSYVIRQLMSTFKTSKKLHGNNFRMKYKTKKDRSQTISILARDWNRNRGEYAFLKTVIVSERPPEINHTVNVTMNRLGHFYMCVSIPLDVSDNQDGVKGKVISLDPGVRTFMTGYDPNGRVVEWGNGDLNKIFRLSKRYDKLQKDKDLAIGRKNKRKRYKLKIKMYRIIVRIRNLINECHHQLARWLCENYEIILIPIFETSNMVLKNKRKIRSKTARMMLTWSHYRFRMFLHHKAREFVSCKVIECTEEYTSKTCGNCGSINKKLGGSKIFRCDSCSLEIDRDMNGARNILLKRITEGQVNPDFGT

SEQ ID NO: 3912 - protein, 626 aa, Gigaspora margarita
MFLTATQASSTLGVSSCTLRRWHRKGKIAAFHSPGGVRLYDVSNIVGSTTTTTTSSSSSSSSSTPKSYVYARVSSSKQKADLERQQEFLLTKCPQHELVSDIGSGINFKRPGLRTILEQASRRMVAEVVVAHRDRLCRFAYDLIEYILKLNGAKLVVLSQDGSSNDETELCQDILAINTVFVCRMQGKRAARYRQERKKQQQKTQETIEINSPLKTPKEDRSNSIPKDQSVPEFLTENIVETMDGLVYNMVVANFNHGHLSTRQYWFRSLLKLKMLHEWNFMKGCPYEVLDHAITHAIQARDEVICRNNELNSDKHHLHFQRKKNNQQTITIRSKSCCKSGSLKFYVRSLHNNQITMSINRHKDNNPLFFPLHHEQRRKNHSWPNLEGKVKMDSKLMFNRKLGYWTFVWVYGKNVENCNDIQVAENLNIVAIDPGVRTGWSWYSPSKGCGWFGNLDINRVFRLSLFLDDLISRTTQAPPKKRNSMKRAQARLQCRIQNLVEECHKKVTLWFLTNFDVIIISPFNGSAMSHRLNRKINSKTVRKMLTWSHSRFRKRLIFKAEELGKKVIIQNEAYTSKTCSCCGFIKHNLGGSKVFRCNECRVVIDRDFNGARGIFLRALLDGAVCI

SEQ ID NO: 3913 - protein, 609 aa, Gigaspora margarita
MFLTATQASSTLGVSSCTLXXXXRKXKIAAFHSPGGVRLYDVSNIVGSTTTTTTTTSSSSSSSSSTPKSYVYARVSSSKQKADLERQQEFLLTKCPQHELVSDIGSGINFKRPGLRTILEQASRRMVAEVVVAHRDRLCRFAYDLIEYILKLNGAKLVVLSQDGSSNDETELCQDILAINTVFVCRMQGKRAARYRQERKKQQQKTQETIEINSPLKTPKEDRSNSIPKDQSVPEFLTENIVETMDGLVYNMVVANFNHGHLSTRQYWFRSLLKLKMLHEWNFMKGCPYEVLDHAITHAIQARDEVICRNNELNSDKHHLHFQRKKNNQQTITIRSKSCCKSGSLKFYVRSLHNNQITMSINRHKDNNPLFFPLHHEQRRKNHNWPNLEGKVKMDSKLMFNRKLGYWTFVWVYGKNVENCNDIQVAENLNIVAIDPGVRTGWSWYSPSKGCGWFGNLDINRVFRLSLFLDDLISRTTQAPPKKRNSMKRAQARLQCRIQNLVEECHKKVTLWFLTNFDVIIIPPFNGSAMSHRLNRKINSKTAEELGKKVIIQNEAYTSKTCSCCGFIKHNLGGSKVFRCNECRVVIDRDFNGARGIFLRALLDGAVCI

SEQ ID NO: 3914 - protein, 598 aa, Gigaspora margarita
MIPQPPPLLKRKVSYTHVSQVTKKKKTFKDRNRSLNPDSRIISSSMMSGQVSTSKETGLRPYWNDQVKEWSQKLWLPTVTDSANSDLTSLNLCSYHTLQNSWFSSTNKVPTNMNYHKISLQSTPSLSVEHKKEKTKTIKARSKKKQKIETTVNRTLSIKTYPNHSQKKILKRWLGLMRYAYNTVVRWNKNRRFCNSSKNFEWIKPHTLNEKLKLYIDVKDKKLQRSCVWGERKFLRTVAWLELRLKGLHDKVPANIIDESIDDALKARKNIIQKNLKETKKSSLSFKSKKDLRQTMTIRMQNFSKKDWNHFYVTQLHSSLTLLSKRCKSNKLESGKRDLRPFHFEKKRKHNKWPLQKIDCDCKLTYLRKTNEWIFHWVYEAQKQIRETQADVHVIAIDPGVRTPFTWYSSTKGVGKIGEYDIGRIFRLCKHMDNLISKKDRLTSSISKRKKKKALRVDKAIFRMKRKINQLRDEVHRKTIKFLTDEFDMIIIPPFEVSDMVNRKSRKITRKXVRKMLCWSHYKFRQRLISKAEEKGIHVVIQNEAYXSKTCSWCGNIQNIGGSEMYNCKNCGIKIDRDVNGARGIFLRALLDGAMILS

SEQ ID NO: 3915 - protein, 625 aa, Gigaspora margarita
MFLTATQASSTLGVSSCTLRRWHRKGKIAAFHSPGGVRLYDVSNIVGSTTTTTTSSSSSSSSTPKSYVYARVSSSKQKTDLERQQEFLLTKSPQHELVSDIGSGINFKRPGLRTILEQASRRMVAEVVVAHRDRLCRFAYDLIEYILKLNGAKLVVLSQDGSSNDETELCQDILAINTVFVCRMQGKRAARYRQERKKQQQKTQETIEINSPLKTPKEDRSNSIPKDQSVPEFLTENIVETMDGLVYNMVVANFNHGHLSTRQYWFRSLLKLKMLHEWNFMKGCPYEVLDHAITHAIQARDEVICRNNELNSDKHHLHFQRKKNNQQTITIRSKSCCKSGSLKFYVRSLHNNQITMSINRHKDNNPLFFPLHHEQRRKNHNWPNLEGKVKMDSKLMFNRKLGYWTFVWVYGKNVENCNDIQVAENLNIVAIDPGVRTGWSWYSPSKGCGWFGNLDINRVFRLSLFLDDLISRTTQAPPKKRNSMKRAQARLQCRIQNLVEECHKKVTLWFLTNFDVIIIPPFNGSAMSHRLNRKINSKTVRKMLTWSHSRFRKRLIFKAEELGKKVIIQNEAYTSKTCSCCGFIKHNLGGSKVFRCNECRVVIDRDFNGARGIFLRALLDGAVCI

SEQ ID NO: 3916 - protein, 623 aa, Gigaspora margarita
MFLTATQASXTLGVSSCTLRRWHRKGKIAAFHSPGGVRLYDVSNIVGSTTTTSSSSSSSSTPKSYVYARVSSSKQKADLERQQEFLLTKCPQHELVSDIGSGINFKRPGLRTILEQASRRMVAEVVVAHRDRLCRFAYDLIEYILKLNGAKLVVLSQDGSSNDETELCQDILAINTVFVCRMQGKRAARYRQERKKQQQKTQETIEINSPLKTPKEDRSNSIPKDQSVPEFLTENIVETMDGLVYNMVVANFNHGHLSTRQYWFRSLLKLKMLHEWNFMKGCPYEVLDHAITHAIQARDEVICRNNELNSDKHHLHFQRKKDNQQTITIRSKSCCKSGSLKFYVRSLHNNQITMSINRHKDNNPLFFPLHHEQRRKNHNWPNLEGKVKMDSKLMLNRKLGYWTFVWVYGKNVENCNDIQVAENLNIVAIDPGVRTGWSWYSPSKGCGWFGNLDINRVFRLSLFLDDLISRTTQAPPKKRNSMKRAQARLQRRIQNLVEECHKKVTLWFLTNFDVIIIPPFNGSAMSHRLNRKINSKTVRKMLTWSHSRFRKRLIFKAEELGKKVIIQNEAYTSKTCSCCGFIKHNLGGSKVFRCNECGVVIDRDFNGARGIFLRALLDGAVCI

SEQ ID NO: 3917 - protein, 204 aa, Gigaspora margarita
MDISLGVRTPFTWYSSTKGVGKIGEYDIGRIFRLCKHMDNLISXKDRLASSISKRKKKKALRVDKAIFRIKRKIKXLQDEVHRKTIKFLTDEFDMIIIPPFXVSXMVNRKSRKITRKTVRKMLCWSHYKFRQRLISKAEEKGIHVVIQNEAYTSKTCSWCGNIQNIGGSEMYNCKNCGIKIDRDVNGARGIFLRALLDGAMILS

SEQ ID NO: 3918 - protein, 624 aa, Gigaspora margarita
MFLTATQASSTLGVSSCTLRRWHRKGKIAAFHSPGGVRLYDVSNIVGSTTTTTTSSSSSSSTPKSYVYARVSSSKQKADLERQQEFLLTKCPQHELVSDIGSGINFKRPGLRTILEQASRRMVAEVVVAHRDRLCRFAYDLIEYILKLNGAKLVVLSQDGSSNDETELCQDILAINTVFVCRMQEKRAARYRQERKKQQQKTQETIEINSPLKTPKEDRSNSIPKDQSVPEFLTENIVETMDGLVYNMVVANFNHGHLSTRQYWFRSLLKLKMLHEWNFMKGCPYEVLDHAITHAIQARDEVICRNNELNSDKHHLHFQRKKNNQQTITIRSKSCCKSVSLKFYVRSLHNNQITMSINRHKDNNPLFFPLHHEQRRKNHNWPNLEGKVKMDSKLMFNRKLGYWTFVWVYGKNVENCNDIQVAENLNIVAIDPGVRTGWSWYSPSKGCGWFGNLDIIRVFRLSLFLDDLISRTTQAPPKKRNSMKRAQARLQCRIQNLVEECHKKVTLWFLTNFDVIIIPPFNGSAMSHRLNRKINSKTVRKMLTWSHSRFRKRLIFKAEELGKKVIIQNEAYTSKTCSCCGFIKHNLGGSKVFRCNECRVVIDRDFNGARGIFLRALLDGAVCI

SEQ ID NO: 3919 - protein, 342 aa, Gigaspora margarita
MFLTATQASSTLGVSSCTLRRWHRKGKIAAFHSPGGVRLYDVSNIVGSTTTTTSSSSSSSTPKSYVYARVSSSKQKADLERQQEFILTKCPQHELVSDIGSGINFKRPGLRTILEQASRRMVAEVVVAHRDRLCRFAYDLIEYILKLNGAKLVVLSQDGSSNDETELCQDILAINTVFVCRMQGKRAARTTQAPPKKRNSMKRAQARLQRRIQNLVEECHKKVTLWFLTNFDVIIIPPFNGSAMSHRLNRKINSKTVRKMLTWSHSRFRKRLIFKAEELGKKVIIQNEAYTSKTCSCCGFIKHNLGGSKVFRCNECGVVIDRDFNGARGIFLRALLDGAVCI

SEQ ID NO: 3920 - protein, 547 aa, Gigaspora margarita
MSTTKYRGAQEIRKTYEVSSETLRRWNNQGKISSIRTSGGKRLYSVTDLEKIFQEKVNEKKKICYARVSSDKQKEDLDRQCEHLMEKYPDHELIKDIGSGLNWKRKGFTSILERSFQGDIDEVVVARKDRLCRFAYELVEWIFGKNDTKILQDTMDSDQLRTGNDEEKLKTRKIRMYPTSEEREKLRKWMGTVRWTYNKVLEMLQDDKISNMNIIRKHYLNDECFANEELSWVKETPREVRSYVIRQLMSTFKTSKKLHGNNFRMKYKTKKDRSQTISILARDWNRNRGEYAFLKTVIVSERPPEINHTVNVTMNRLGHFYMCVSIPLDVSDNQDGVKGKVISLDPGVRTFMTGYDPNGRVVEWGNGDLNKIFRISKRYDKLQKDKDLAIGRKNKRKRYKLKIKMYRIIVRIRNLINECHHQLARWLCENYEIILIPIFETSNMVLKNKRKIRSKTARMMLTWSHYRFRMFLHHKAREFVSCKVIECTEEYTSKTCGNCGSINKKLGGSKIFRCDSCSLEIDRDMNGARNILLKRITEGQVNPDFGT

SEQ ID NO: 3921 - protein, 576 aa, Gigaspora margarita
MFQASSTLGVSSCTLRRWHRKGKIAAFHSPGGVRLYDVSNIVGSTTTTTTTTSSSSSSSTPKSYVYARVSSSKQKADLERQQEFLLTKCPQHELVSDIGSGINFKRPGLRTILEQASRRMVAEVVIAHRDRLCRFAYDLIEYILKLNGAKLVVLSQDGSSNDETELCQDILAINTVFVCRMQGKRAARYRQERKKQQQKTQETIEINSPLKTPKEDRSNSIPKDQSVPEFLTENIVETMDGLVYNMVVANFNHGHLSTRQYWFRSLLKLKMLHEWNFMKGCPYEVLDHAITHAIQARDEVICRNNELNSDKHHLHFQRKKNNQQTITIRSKSCCKSGSLKFYVRSLHNNQITMSINRHKDNNPLFFPLHHEQRRKNHNWPNLEGKVKMDSKLMFNRKLGYWTFVWVYGKNVENCNDIQVAENLNIVAIDPGVRTGWSWYSPSKGCGWFGNLDINRVFRLSLFLDDLISRTTQAPPKKRNSMKRAQARLQCRIQNLVEECHKKVTLWFLTNFDVIIIPPFNGSAMSHRLNRKINSKTICKMLTWSHSQFRKRLIFKAEELGKKVIIQNEAYTSKTCX

SEQ ID NO: 3922 - protein, 626 aa, Gigaspora margarita
MFLTATQASSTLGVSSCTLRSWHRKGKIAAFHSPGGVRLYDVSNIVGSTTTTTTTSSSSSSSSTPKSYVYARVSSSKQKADLERQQEFLLTKCPQHELVSDIGSGINFKRPGLRTILEQASRRMVAEVVVAHRDRLCRFAYDLIEYILKLNGAKLVVLSQDGSSNDETELCQDILAINTVFVCRMQGKRAARYRQERKKQHQKTQETIEINSPLKTPKEDRSNSIPKDQSVPEFLTENIVETMDGLVYNMVVANFNHGHLSTRQYWFRSLLKLKMLHEWNFMKGCPYEVLDHAITHAIQARDEVICRNNELNSDKHHLHFQRKKNNQQTITIRSKSCCKSGSLKFYVRSLHNNQITMSINRHKDNNPLFFPLHHEQRRKNHNWPNLEGKVKMGSKLMFNRKLGYWTFVWVYGKNVENCNDIQVAENLNIVAIDPGVRTGWSWYSPSKGCGWFGNLDINRVFCLSLFLDDLISRTTQAPPKKRNSMKRAQARLQCRIQNLVEECHKKVTLWFLTNFDVIIIPPFNGSAMSHRLNRKINSKTVRKMLTWSHSQFRKRLIFKAEELGKKVIIQNEAYTSKTCSCCGFIKHNLGGSKVFRCNECRVVIDRDFNGARGIFLRALLDGAVCI

SEQ ID NO: 3923 - protein, 591 aa, Gigaspora margarita
MFQISWAPPPPPPPPPLPPPPPPPLRQRVMSTHKFQVQSRRQTLSGNKSFSSLXXPNTNSSQTLEVVSTSRDPACAPYWNKQVAEWSQKLWLPTGTDYVDSHMISSDTFLNSMVQNSWFSHKMAPPMTKLNSVKISLPSTLSLSVECKESEQQDIDKNEKNGSRKRKKPLKSTRRSKRQKKTDLTRSLKIRVYPNSSQKTLLKQWMGCARLVYNMVVANFNHGHLSTRQYWFRSLLKLKMLHEWNFMKGCPYEVLDHAITHAIQARDEVICRNNELNSDKHHLHFQGKKNNQQTITIRSKSCCKSGSLKFYVRSLHNNQITMSINRHKDNNPLFFPLHHEQRRKNHNWPNLEGKVKMDSKLMFNRKLGYWTFVWVYGKNVENCNDIQVAENLNIVAIDPGVRTGWSWYSPSKGCGWFGNLDINRVFRLSLFLDDLISRTTQAPPKKRNSMKRAQARLQCCIQNLVEECHKKVTLWFLTNFDVIIIPPFNGSAMSHRLNRKINSKTVRKMLTWSHSRFRKRLIFKAEELGKKVIIQNEAYTSKTCSCCGFIKHNLGGSKVFRCNECRVVIDRDFNGARGIFLRALLDGAVCI

SEQ ID NO: 3924 - protein, 281 aa, Gigaspora margarita
MSINRHKDNNPLFFPLHHEQRRKNHNWPNLEGKVKMDSKLMFNRKLGYWTFVWVYGTLRQHQSMHGGKNVENCNDIQVAENLNIVAIDPGVRTGWSWYSPSKGCGWFGNLDINRVFRLSLFLDDLISRTTQAPPKKRNSMKRAQARLQCRIQNLVEECHKKVTLWFLTNFDVIIIPPFNGSAMSHRLNRKINSKTVRKMLTWSHSRFRKRLIFKAEELGKKVIIQNEAYTSKTCSCCGFIKHNLGGSKVFRCNECRVVIDRDFNGARGIFLRALLDGAVCI

SEQ ID NO: 3925 - protein, 345 aa, Gigaspora margarita
MFLTATQASSTLGVSSCTLRRWHRKGKIAAFHSPGGVRLYDVSNIVGSTTTTTTSSSSSSSSSTPKSYVYARVSSSKQKADLERQQEFLLTKCPQHELVSDIGSGINFKRPGLRTILEQASRRMVAEVVVAHRDRLCRFAYDLIEYILKLNGAKLVVLSQDGSSNDETELCQDILAINTVFVCRMQGKRAARTTQAPPKKRNSMKRAQARLQCRIQNLVEESHKKVTLWFLTNFDVIIIPPFNGSAMSHRLNRKINSKTVRKMLTWSHSRFRKRLIFKAEELGKKVIIQNEAYTSKTCSCCGFIKHNLGGSKVFRCNECRVVIDRDFNGARGIFLRALLDGAVCI

SEQ ID NO: 3926 - protein, 450 aa, Gigaspora margarita
MLVNRTLSIKTYPNHLQKRILKRWLGLTRYAYNTVVRWDKSRHRCDSSKHFEWIKPQTLSERLKLYIDVKEGKDLNEKDKKLQRSCVWGERKFLHTVVWLELHLKGLHDKVPTNVIDESIDEALIARKNIIQKNSKETKKSSLSFRSKKGLWQTMTIRVQNFSKKDWNHFYTTYLHNSSTLLSKRYKSNKLESGKRDLRPFHFEKKRKHNKWPLQKIDCDCKLTYIRKTNEWIFYWVYEAQKQIRETQADVHVVSIDPGVRTPFTWYSSTKGVGKIGEYDIGRIFRLYKHMDDLISQKDKLASSISKRKKKKALRVDKAIFRMKRKIKRLQDEIHRKTIKFLTDEFDMIIIPPFEVSGMINRKARKITRKTVRKMLCWSHYKFRQRLISKAEEKGIHVLIQNEAYTSKTCSWCGNIQNIGGSETYKCKNCDIKIDRDVNGARGIFLRVLP

SEQ ID NO: 3927 - protein, 626 aa, Gigaspora margarita
MFLTATQASSTLGVSSCTLRRWHRKGKIAAFHSPGGVRLYDVSNIVGSTTTTTNTSSSSSSSSTPKSYVYARVSSSKQKADIERQQEFLLTKCPQHELVSDIGSGINFKRPGLRTILEQASRRMVAEVVVAHRDRLCRFAYDLIEYILKLNGAKLVVLSQDSSSNDETELCQDILAINTVFVCRMQGKRAARYRQERKKQQQKTQETIEINSPLKTPKEDRSNSIPKDLSVPEFLTENIVETMDGLVYNMVVANFNHGHLSTRQYWFRSLLKLKMLHEWNFMKGCPYEVLDHAITHAIQARDEVICRNNELNSDKHHLHFQRKKNNQQTITIRSKSCCKSGSLKFYVRSLHNNQITMSINRHKDNNPLFFPLHHEQRRKNHNWPNLEGKVKMDSKLMFNRKLGYWTFVWVYGKNVENCNDIQVAENLNIVAIDPGVHTGWSWYSPSKGCGWFGNLDINRVFRLSLFLDDLISRTTQAPPKKRNSMKRAQARLQCRIQNLVEECHKKVTLWFLTNFDVIIIPPFNGSAMSHRLNRKINSKTVRKMLTWSHSRFRKRLIFKAEELGKKVIIQNEAYTSKTCSCCGFIKHNLGGSKVFRCNECRVVIDRDFNGARGIFLRALLDGAVCI

SEQ ID NO: 3928 - protein, 621 aa, Gigaspora margarita
MFLTATQASFTLGVSSCTLRRWHRKGKIAAFHSPGGVRLYDVSNIVGSTTTTTSSSSSTPKSYVYARVSSSKQKADLERQQEFLLTKCPQHELVSDIGSGINFKRPGLRTILEQASRRMVAEVVVAHRDRLCRFAYDLIEYILKLNGAKLVVLSQDGSSNDETELCQDILAINTVFVCRMQGKRAARYRQERKKQQQKTQETIEINSPLKTPKEDRSNSIPKDQSVPEFLTENIVETMDGLVYNMVVANFNHGHLSTRQYWFRSLLKLKMLHEWNFMKGCPYEVLDHAITHAIQARDEVICRNNELNSDKHHLHFQRKKDNQQTITIRSKSCCKSGSLKFYVRSLHNNQITMSINRHKDNNPLFFPLHHEQRRKNHNWPNLEGKVKMDSKLMFNRKLGYWTFVWVYGKNVENCNDIQVAENLNIVAIDPGVRTGWSWYSPSKGCGWFGNLDINRVFRLSLFLDDLISRTTQAPPKKRNSMKRAQARLQRRIQNLVEECHKKVTLWFLTNFDVIIIPPFNGSAMSHRLNRKINSKTVRKMLTWSHSRFRKRLIFKAEELGKKVIIQNEAYTSKTCSCCGFIKHNLGGSKVFRCNECGVVIDRDFNGARGIFLRALLDGAVCI

SEQ ID NO: 3929 - protein, 854 aa, Gigaspora margarita
MFLTATQASSTLGVSSCTLRRWHRKGKIAAFHSPGGVRLYDVSNIVGSTTTTTTTTSSSSSSSTPKSYVYARVSSSKQKADLERQQEFLLTKCPQHELVSDIGSGINFKRPGLRTILEQASRRMVAEVVVAHRDRLCRFAYDXCSLLPPRLLPPLVFPRVHFVAGTAKVKLQHFIHQVVCDFTMFQISWAPPPPPPPPPPPPPPPLRQRVMSTHEFQVQSRRQTLSGNKSFSSLSVPNTNSSQTLEVVSTSRDPACAPYWNKQVAEWSQKLWLPTGTDYVDSHMISSNTFLNSMVQNSWFSHKMAPPMTKLNSVKISLPSTLSLSVECKESEQQDIDKNEKNSSRKRKKPLKSTRRSKRQKKTDLTRSLKIRVYPNSSQKTLLKQWMGCARLVYNMVVANFNHGHLSTRQYWFRSLLKLKMLHEWNFMKGCPYEVLDHAITHAIQARDEVICRNNELNSDKHHLHFQRKKNNQQTITIRSKSCCKSGSLKFYVRSLHNNQITMSINLHKDNNPLFFPLHHEQRRKNHNWPNLEGKVKMDSKLMFNRKLGYWTFVWVYGKNVENCNDIQVAENLNIVAIDPGVRTGWSWYSPSKGCGWFGNLDINRVFRLFLFLDDLISRTTQAPPKKRNSMKRAQARLQCRIQNLVEECHKKVTLWFLTNFDVIIIPPFNGSAMSHRLNRKINSKTVRKMLTWSHSRFRKRLIFKAEELGKKVIIQNEAYTSKTCSCCGFIKHNLGGSKVFRCNECRVVIDRDFNGARGIFLRALLDGAKMSNKYNCSKLAIYDVPMSIVQETTREEELLLRTNIIKGLFIQKATEDIIIGQNPVMTYIRDVQDHMCNYDCSVPVRSLQITCSM

SEQ ID NO: 3930 - protein, 629 aa, Gigaspora margarita
MFLTATQASSTLGVSSCTLRRWHRKGKIAAFHSPGGVRLYDVSNIVGSTTTTTTTTSSSSSSSSSSTPKSYVYARVSSSKQKADLERQQEFLLTKCPQHELVSDIGSGINFKRPGLRTILEQANRRMVAEVVVAHRDRLCRFAYDLIEYILKLNGAKLVVLSQDGSSNDETELCQDILAINTVFVCRMQGKRAARYRQERKKQQQKTQETIEINSPLKTPKEDRSNSIPKDQSVPEFLTENIVETMDGLVYNMVVANFNHGHLSTRQYWFRSLLKLKMLHEWNFMKGCPYEVLDHAITHAIQARDEVICRNNELNSDKHHLHFQRKKNNQQTITIRSKSCCKSGSLKFYVRSLHNNQITMSINRHKDNNPLFFPLHHEQRRKNHNWPNLEGKVKMDSKLMFNRKLGYWTFVWVYGKNVENCNDIQVAENLNIVAIDPGVRTGWSWYSPSKGCGWFGNLDINRVFRLSLFLDDLISRTTQAPPKKRNSMKRAQARLQCRIQNLVEECHKKVTLWFLTNFDVIIIPPFNGSAMSHRLNRKINSKTVRKMLTWSHSRFRKRLIFKAEELGKKVIIQNEAYTSKTCSCCGFIKHNLGGSKVFRCNECRVVIDRDFNGARGIFLRALLDGAVCI

SEQ ID NO: 3931 - protein, 628 aa, Gigaspora margarita
MFLTATQASSTLGVSSCTLRRWHRKGKIAAFHSPGGVRLYDVSNIVGSTTTTTTTTSSSSSSSSSTPKSYVYARVSSSKQKADLERQQEFLLTKCLQHELVSDIGSGINFKRPGLRTILEQASRRMVAEVVVAHRDRLCRFAYDLIEYILKLNGAKLVVLSQDGSSNDETELCQDILAINTVFVCRMQGKRAARYQQERKKQQQKTQETIEINSPLKTPKEDRSNSIPKDQSVPEFLTENIVETMDGLVYNMVVANFNHGHLSTRQYWFRSLLKLKMLHEWNFMKGCPYEVLDHAITHAIQARDEVICRNNELNSDKHHLHFQRKKNNQQTITIRSKSCCKSGSLKFYVCSLHNNQITMSINRHKDNNPLFFPLHHEQRRKNHNWPNLEGKVKMDSKLMFNRKLGYWTFVWVYGKNVENCNDIQVAENLNIVAIDPGVRTGWSWYSPSKGCGWFGNLDINRVFRLSLFLDDLISRTTQAPPKKRNSMKRAQARLQCRIQNLVEECHKKVTLWFLTNFDVIIIPPFNGSAMSHRLNRKINSKTVRKMLTWSHSRFRKRLIFKAEELGKKVIIQNEAYTSKTCSCCGFIKHNLGGSKVFRCNECRVVIDRDFNGARGIFLRALLDGAVCI

SEQ ID NO: 3932 - protein, 626 aa, Gigaspora margarita
MFLTATQASSTLGVSSCTLRRWHRKGKIAAFHSPGGVRLYDVSNIVGSTTTTTTTSSSSSSSSTPKSYVYARVSSSKQKADLERQQEFLLTKCPQHELVSDIGSGINFKRPGLRTILEQASCRMVAEVVVAHRDRLCRFAYDLIEYILKLNGAKLVVLSQDGSSNDETELCQDILAINTVFVCRMQGKRAARYRQERKKQQQKTQETIEINSPLKTPKEDRSNSIPKDQSVPEFLTENIVETMDGLVYNMVVANFNHCHLSTRQYWFRSLLKLKMLHEWNFMKGCPYEVLDHAITHAIQARDEVICRNNELNSDKHHLHFQRKKNNQQTITIRSKSCCKSGSLKFYVRSLHNNQITMSINRHKDNNPLFFPLHHEQRRKNHNWPNLEGKVKMDSKLMFNRKLGYWTFVWVYGKNVENCNDIQVAENLNIVAIDPGVRTGWSWYSPSKGCGWFGNLDINRVFRLSLFLDDLISRTTQAPPKKRNSMKRAQARLQCRIQNLVEECHKKVTLWFLTNFDVIIIPPFNGSAMSHRLNRKINSKTVRKMLTWSHSRFRKRLIFKAEELGKKVIIQNEAYTSKTCSCCGFIKHNLGGSKVFRCNECRVVIDRDFNGARGIFLRALLDGAVCI

SEQ ID NO: 3933 - protein, 624 aa, Gigaspora margarita
MFLTATQASSTLGVSLCTLRRWHRKGKIAAFHSPGGVRLYDVSNIVGSTTTTTTTTSSSSSTPKSYVYARVSSSKQKADLERQQEFLLTKCPQHELVSDIGSGINFKRPGLRTILEQASRRMVAEVVVAHRDRLCRFAYDLIEYILKLNGAKLVVLSQDGSSNDETELCQDILAINTVFVCRMQGKRAARYRQGRKKQQQKTQETIEINLPLKTPKEDRSNSIPKDQSVPEFLTENIVETMDGLVYNMVVANFNHGHLSTRQYWFRSLLKLKMLHEWNFMKGCPYEVLDHAITHAIQARDEVICRNNELNSDKHHLHFQRKKNNQQTITIRSKSCCKSGSLKFYIRSLHNNQITMSINRHKDNNPLFFPLHHEQRRKNHNWPNLEGKVKMDSKLMFNRKLGYWTFVWVYGKNVENCNDIQVAENLNIVAIDPGVRTGWSWYSPSKGCGWFGNLDINRVFRLSLFLDDLISRTTQAPPKKRNSMKRAQARLQCRIQNLVEECHKKVTLWFLTNFDVIIIPPFNGSAMSHRLNRKINSKTVRKMLTWSHSRFRKRLIFKAEELGKKVIIQNEAYTSKTCSCCGFIKHNLGGSKVFRCNECRVVIDRDFNGARGIFLRALLDGAVCI

SEQ ID NO: 3934 - protein, 628 aa, Gigaspora margarita
MFLTATQASSTLGVSSCTLHRWHRKGKIAAFHSPGGVRLYDVSNIVGSTTTTTTTTTSSSFSSSSTPKSYVYARVSSSKQKADLERQQEFLLTKCPQHELVSDIGSGINFKRPGLRTILEQASRRMVAEVVVAHRDRLCRFTYDLIEYILKLNGAKLVVLSQDGSSNDETELCQDILAINTVFVCRMQGKRAARYRQERKKQQQKMQETIEINSPLKTPKEDRSNSIPKDQSVPEFLTENIVETMDGLVYNMVVANFNHGHLSTRQYWFRSLLKLKMLHEWNFMKGCPYEVLDHAITHAIQARDEVICRNNELNSDKHHLHFQRKKNNQQTITIRSKSCCKSGSLKFYVRSLHNNQITMSINRHKDNNPLFFPLHHEQRRKNHNWPNLEGKVKMDSKLMFNRKLGYWTFVWVYGKNVENCNDIQVAENLNIVAIDPGVRTGWSWYSPSKGCGWFGNLDINRVFRLSLFLDDLISRTTQAPPKKRNSMKRAQARLQCRIQNLVEECHKKVTLWFLTNFDVIIIPPFNGSAMSHRLNRKINSKTVRKMLTWSHSRFRKRLIFKAEELGKKVIIQNEAYTSKTCSCCGFIKHNLGGSKVFRCNECRVVIDRDFNGARGIFLRALLDGAVCI

SEQ ID NO: 3935 - protein, 626 aa, Gigaspora margarita
MFLTATQASSTLGVSSCTLRRWHRKGKIAAFHSPGGVRLYDVSNIVGSTTTTTTTSTSSSSSSTPKSYVYARVSSSKQKADLERQQEFLLTKCPQHELVSDIGSGINFKRPGLRTILEQASRRMVAEVVVAHRDRLCRFAYDLIEYIRKLNGAKLVVLSQDGSSNDETELCQDILAINTVFVCRMQGKRAARYRQERKKQQQKTQETIEINSPLKTPKEDRSNSIPKDQSVPEFLTENIVETMDGLVYNMVVANFNHGHLSTRQYWFRSLLKLKMLHEWNFMKGCPYEVLDHAITHAIQARDEVICRNNELNSDKHHLHFQRKKNNQQTITIRSKSCCKSGSLKFYVRSLHNNQITMSINRHKDNNPLFFPLHHEQRRKNHNWPNLEGKVKMDSKLMFNRKLGYWTFVWVYGKNVENCNDIQVAENLNIVAIDPGVRTGWSWYSPSKGCGWFGNLDINRVFRLSLFLDDLISRTTQAPPKKRNSMKRAQARLQCRIQNLVEECHKKVTLWFLTNFDVIIIPPFNGSAMSHRLNRKINSKTVRKMLTWSHSRFRKRLIFKAEELGKKVIIQNEAYTSKTCSCCGFIKHNLGGSKVFRCNECRVVIDRDFNGARGIFLRALLDGAVCI

SEQ ID NO: 3936 - protein, 637 aa, Gigaspora margarita
MFLTATQASSTLGVSSCTLRRWHRKGKIAAFHSPGGVRLYDVSNIVGSTTTTTTTTSSSSSSSTPKSYVYARVSSSKQKADLERQQEFLLTKCPQHELISDIGSGINFKRPGLRTILEQASRRIVAEVVVAHRDRLCRFAYDLIEYILKLNGAKLVVLSQDGSSNDETELCQDILAINTVFVCRMQGKRAARYRQERKKQQQKTQETIEINSPLKKTDLTRSLKIRVYPNSSQKTLLKQWMGCARLVYNMVVANFNHGHLSTRQYWFRSLLKLKMVHEWNFMKGCPYEVLDHAITHAIQARDEVICQNNELNSDKHHLHFQRKKNNQQTITIRSKSCCKSGSLKFYVCSLHNNQITMSINRHKDNNPLFFPLHHEQRRKNHNWPNLEGKVKMDSKLMFNRKLGYWTFVWVYGTLRQHQSMQGGKNVENCNDIQVAENLNIVAIDPGVRTGWSWYSPSKGCGWFGNLDINRVFRLSLFLDDLISRTTQAPPKKRNSMKRAQARLQCRIQNLVEECHKKVTLWFLTNFDVIIIPPFNGSAMSHRLNRKINSKTVRKMLTWSHSRFRKRLIFKAEELGKKVIIQNEAYTSKTCSCCGFIKHNLGGSKVFRCNECRVMIDRDFNGARGIFLRALLDGAVCI

SEQ ID NO: 3937 - protein, 626 aa, Gigaspora margarita
MFLTATQASSTLGVSSCTLRRWHRKGKIAAFHSPGGVRLYDVSNIVGSTTTTTTTSSSSSSSSTPKSYVYARVSSSKQKADLERQQEFLLTKCPQHELVSDIESGINFKRPGLRTILEQASRRMVAEVVVAHRDRLCRFAYDLIEYILKLNGAKLVVLSQDGSSNDETELCQDILAINTVFVCRMQGKRAARYRQERKKQQQKTQETIEINSPLKTPKEDRSNSIPKDQSVPEFLTENIVETMDGLVYNMVVANFNHGHLSTRQYWFRSLLKLKMLHEWNFMKGCPYEVLDHAITHAIQARDEVICRNNELNSDKHHLHFQRKKNNQQTITIRSKSCCKSGSLKFYVRSLHNNQITMSINRHKDNNPLFFPLHHEQRRKNHNWPNLEGKVKMDSKLMFNRKLGYWTFVWVYGKNVENCNDIQVAENLNIVAIDPGVRTGWSWYSPSKGCGWFGNLDINRVFRLSLFLDDLISRTTQAPPKKRNSMKRAQARLQCRIQNLVEECHKKVTLWFLTNFDVIIIPPFNGSAMSHRLNRKINSKTVRKMLTWSHSRFRKRLIFKAEELGKKVIIQNEAYTSKTCSCCGFIKHNLGGSKVFRCNECRVVIDRDFNGARGIFLRALLDGAVCI

SEQ ID NO: 3938 - protein, 503 aa, Gigaspora margarita
MIPQPPPLLKRKVSYTHVSQVTKKKKTFKDRNRSLNPDSRIISSSMMSGQVSTSKETGLRPYWNDQVKEWSQKLWLPTVTDSANSDLTSLNLCSYHTLQNSWFSSTNKVPTNMDILAINTVFICRTQEREDKNNKSTKQKKTKNRNCCESNITNQNIKPHTLNEKLKLYIDVKEGKDLNEKDKKLQRSCVWGERKFLRTVAWLELRLKGLHDKVPIYVTQLHSSLTLLSKRCKSNKLESGKRDLRPFHFEKKRKHNKWPLQKIDCDCKLTYLRKTNEWIFHWVYEAQKQICETQADVHVIAIDPGVRTPFTWYSSTKGVGKIGEYDIGRIFRLCKHMDNLISKKDRLASSISKRKKKKALRVDKAIFRMKRKIKRLRDEVHRKTIKFLTDEFDMIIIPPFEVSDMVNRKSRKITRKTVRKMLCWSHYKFRQRLISKAEEKGIHVVIQNEAYTSKTCSWCGNIQNIGGSEKYNCKNCGIKIDRDVNGARGIFLRALLDGAMILS

SEQ ID NO: 3939 - protein, 623 aa, Gigaspora margarita
MFLTATQASSTLGVSSCTLRRWHRKGKIAAFHSPGGVRLYDVSNIVGSTTTTTTSSSSSSTPKSYVYARVSSSKQKADLERQQEFLLTKCPQHELVSDIGSGINFKRPGLRTILEQASRRMVAEVVVAHRDRLCRFAYDLIEYILKLNGAKLVVLSQDGSSNDETELCQDILAINTVFVCRMQGKRAARYRQERKKQQQKTQETIEINSPLKTPKEDRSNSIPKDQSVPEFLTENIVETMDGLVYNMVVANFNHGHLSTRQYWFRSLLKLKILHEWNFMKGCPYEVLDHAITHAIQARDEVICRNNELNSDKHHLHFQRKKNNQQTITIRSKSCCKSGSLKFYVRSLHNNQITMSINRHKDNNPLFFPLHHEQRRKNHNWPNLEGKVKMDSKLMFNRKLGYWTFVWVYGKNVENCNDIQVAENLNIVAIDPGVRTGWSWYSPSKGCGWFGNLDINRVFRLSLFLDDLISRTTQAPPKKRNSMKRAQARLQRRIQNLVEECHKKVTLWFLTNFDVIIIPPFNGSAMSHRLNRKINSKTVRKMLTWSHSRFRKRLIFKAEELGKKVIIQNEAYTSKTCSCCGFIKHNLGGSKVFRCNECGVVIDRDFNGARGIFLRALLDGAVCI

SEQ ID NO: 3940 - protein, 625 aa, Gigaspora margarita
MFLTATQASSTLGVSSCTLRRWHRKGKIAAFHSPGGVRLYDVSNIVGSTTTTTTTSSSSSSSTPKSYVYARVSSSKQKADLERQQEFLLTKCPQHELVSDIGSGINFKRPGLRTILEQASRRMVAEVVVAHRDRLCRFAYDLIEYILKLNGAKLVVLSQDGSSNDETELCQDILAINTVFVCRMQGKRAARYRQERKKQQQKTQETIEINSPLKTPKEDRSNSIPKDQSVPEFLTENIVETMDGLVYNMVVANFNHGHLSTRQYWFRSLLKLKMLHEWNFMKGCPYEVLDHAITHAIQARDEVICRNNELNSDKHHLHFQRKKNNQQTITIRSKSCCKSGSLKFYVRSLHNNQITMSINRHKDNNPLFFPLHHEQRRKNHNWPNLEGKVKMDSKLMFNRKLGYWTFVWVYGKNVENCNDIQVAENLNIVAIDPGVRTGWSWYSPSKGCGWFGNLDINRVFRLSLFLDDLISRTTQAPPKKRNSMKRAQARLQCRIQNLVEECHKKVTLWFLTNFDVIIIPPFNGSAMSHRLNRKINSKTVRKMLTWSHSRFRKRLIFKAEELGKKVIIQNEAYTSKTCSCCGFIKHNLGGSKVFRCNECRVVIDRDFNGARGIFLRALLDGAVCI

SEQ ID NO: 3941 - protein, 613 aa, Gigaspora margarita
MIPQPPPLPKRKVFYTHVPQVKKKTLKDRNRSLNPDSRIMSSSMMSVQVSTSKKTDLRPYWNNQVKEWSQKLWLPTMXDSADSHLTSLNLCSHYTLXNSWFSSTNQVPTNMKYHKISLQLTPSLSVEYKEEDQLCTEEXGKPKTIKARSKKKRKIETTVNRTLSIKXYPNHSQKKILKRWLGLMRYAYNTVVRWNKNRRFCNSSKNFEWIKPYXLNEKLKLYTDIKEGKDLNEKDKKLWRSCAWGERKFLRTVVWLELRLKGLHDKVPANIIDESIDDALIARKNIIQKNLKDTKKSFLSFKSKKDLRQTMTIRAQNFSKKDWNHFYVTHLHNSSTLLSKRCKPNDFEGGKRDLCPFHFEKKRKHNKWPSQRIDCDCKLTYLHKTXEWIFYWVYEAQKQIXETQADVHVVSIDPGVRTXFTWYSSTKGAGKIGEYDIGRIFRLCKHMDDLISKKDRLXSSISKXKKKKALRVDKAIFRMKRKIRRLQEEIHRKTIKFLTDEFDMIIIPSFEVSNMVNRKTRKIARKIVRKMLCWSHYKFRQRLISKAEEKGINVIIQNEAYTSKTCSWCGNIQNIGGSEMYKCKNCNIKIDRDVNGGRGIFLRALLDRALILS

SEQ ID NO: 3942 - protein, 657 aa, Gigaspora margarita
MFQISWAPPPLPPPPPPPPPPPLRQRVMSTHEFQVQSRRQTLSGNKSFSSLSVPNTNSSQTLEVVSTSRDPACAPYWNKQVAEWSQKLWLPTGTDYVDSHMISSNTFLNSMVQNSWFSHKMAPPMTKLNSVKISLPSTLSLSVECKESEQQDIDKNEKNSSRKRKKPLKSTRRSKRQKKTDLTRSLKIRVYPNSSQKTLLKQWMSCARLVYNMVVANFNHGHLSTRQYWFRSLLKLKMLHEWNFMKGCPYEVLDHAITHAIQARDEVICRNNELNSDKHHLHFQRKKNNQQTITIRSKSCCKSGSLKFYVRSLHNNQITMSINRHKDNNPLFFPLHHEQRRKNHNWPNLEGKVKMDSKLMFNRKLGYWTFVWVYGKNVENCNDIQVAENLNIVAIDPGVRTGWSWYSPSKGCGWFGNLDINRVFRLSLFLDDLISRTTQAPPKKRNSMKRAQARLQCRIRNLVEECHKKVTLWFLTNFDVIIIPPFNGSAMSHRLNRKINSKTVRKMLTWSHSRFRKRLIFKAEELGKKVIIQNEAYTSKTCSCCGFIKHNLGGSKVFRCNECRVVIDRDFNGARGIFLRALLDGAVSLSDPIDVYSDWVDASEHVRPEGHLSHGDYDDDNEHEREEDDEGSYHQSSHRVIGGGRSPDFDDYDDLEE

SEQ ID NO: 3943 - protein, 626 aa, Gigaspora margarita
MFLTATQASSTLGVSSCTLRRWHRKGKIAAFHSPGGVRLYDVSNIVGSTTTTTTSSSSSSSSSTPKSYVYARVSSSKQKADLERQQEFLLTKCPQHELVSDIGSGINFKRPGLRTILEQASRRMVAEVVVVHRDRLCRFAYDLIEYILKLNGAKLVVLSQDGSSNDETELCQDILAINTVFVCRMQGKRAARYRQERKKQQQKTQETIEINSPLKTPKEDRSNSIPKDQSVPEFLTENIVETMDGLVYNMVVANFNHGHLSTRQYWFRSLLKLKMLHEWNFMKGCPYEVLDHAITHAIQARDEVICRNNELNSDKHHLHFQRKKNNQQTITIRSKSCCKSGSLKFYVRSLHNNQITMSINRHKDNNPLFFPLHHEQRRKNHNWPNLEGKVKMDSKLMFNRKLGYWTFVWVYGKNVENCNDIQVAENLNIVAIDPGVRTGWSWYSPSKGCGWFGNLDINRVFRLSLFLDDLISRTTQAPPKKRNSMKRAQARLQCRIQNLVEECHKKVTLWFLTNFDVIIIPPFNGSAMSHRLNRKINSKTVRKMLTWSHSRFRKRLIFKAEELGKKVIIQNEAYTSKTCSCCGFIKHNLGGSKVFRCNECRVVIDRDFNGARGIFLRALLDGAVCI

SEQ ID NO: 3944 - protein, 430 aa, Gigaspora margarita
MRYAYNTVVRWNKNRRFCNSSKNFEWIKPYTLNEKLKLYTDIKEGKDLNEKDKKLRRSCVWGERKFLRTVVWLELRLKGLHDKVPANIIDESIDDALIARKNIIQKNLKDTKKSFLSFKSKKDLRQTMTIRAQNFSKKDWNHFYVTHLHNSSTLLSKRCKPNDFEGGKRDLCPFHFEKKRKHNKWPSQRIDCDCKLTYLHKTNEWIFYWVYEAQKQIRETQADVHVVSIDPGVRTPFTWYSSTKGAGKIGEYDIGRIFRLCKHMDDLISKKDRLASSISKRKKKKALRVDKAIFRMKRKIRXLQEEIHRKTIKFLTDEFDMIIIPSFEVSNMVNRKTRKITRKTVRKMLCWSHYKFRQRLISKAEEKGINVIIQNEAYTSKTCSWCGNIQNIGGSETYKCKNCNIKIDRDVNGARGIFLRALLDGAMILS

SEQ ID NO: 3945 - protein, 223 aa, Gigaspora margarita
MYHLHIPIPLSMRNKKEGRIISLDPGVRSFLTGYDPGGNVVEFCKNDFSRLSRLCIRHDKYQSQSTKVNSRKRYVIKRKMRRIYHKIHNLVNDCHKKIAKYLCDNYQTIVLPIFKTQEMVRRAKRQIRTKTALNMLTWSHFRFRQFLLHKMSEYPGRRLIICTEEYTSKTCGRCGYIKNNLGGNKKFKCNECGLIIDRDVNGARNILLKLLSQVTPDAVAYHP

SEQ ID NO: 3946 - protein, 393 aa, Gigaspora margarita
MVIDEIKFILNSSAVAVDNPKGLIRRVWIWLTLLCCLRGGNAKWLKASWLKELDDGGMRLELPKEKNHARGIKDPYAESGSSFIPPDIPENAYTPVADIRRYLYKRPNNVDADYFFVSINTPKNIYRGDWYLASKLGKGTQDTMVHSICKDAKLDFKDRCITNHSMRSTGIHNLVELGVTLDEQMIFFSPQNYRRSFCLSASIIKTQARQCFPFDSKPDSRIVLKDLTSNYTNEIEFSKASELLSSKSEVYDKVKDDESRAESDDEANSANRGKTYHMMKKYKDSLADLNKSLAINSNNVFTFSKTWRNGRTKTARNMLTWSHFRFRQFLLHKMSEYPGRRLIICTEEYTSKTCGRCGYIKNNLGENKKFKCDECGLIIDKDVNGRETSCLNC

SEQ ID NO: 3947 - protein, 679 aa, Gigaspora margarita
MFLTATQASXTLGVSSCTLRRWHRKGKIAAFHSPGGVRLYDVSNIVGSTTTTTTTSSSSSSSSTPKSYVYARVSSSKQKADLERQQEFLLTKSPQHELVSDIGSGINFKRPGLRTILEQASRRMVAEVVVAHRDRLCRFAYDLIEYILKLNGAKLVVLSQDGSSNDETELCQDILAINTVFVCRMQGKRAARYRQERKKQQQKTQEIIEINSPLKTPKEDRSNSIPKDQSVPEFLTENIVKTMDGLVYNMVVANFNHGHLSTRQYWFRSLLKLKMLHEWNFMKGCPYEVLDHAITHAIQARDEVICRNNELNSDKHHLHFQRKKNNQQTITIRSKSCCKSGSLKFYVRSLHNNQITMSINRHKDNNPLFFPLHHEQRRKNHNWPNLEGKVKMDSKLMFNRKLGYWTFVWVYGKNVENCNDIQVAENLNIVAIDPGVRTGWSWYSPSKGCGWFGNLDINRVFRLSLFLDDLISRTTQAPPKKRNSMKRAQARLQCRIQNLVEECHKKVTLWFLTNFDVIIIPPFNGSAMSHRLNRKINSKTVRKMLTWSHSRFRKRLIFKAEELGKKVIIQNEAYTSKTCSCCGFIKHNLGGSKVFRCNECRVVIDRDFNGAXGIFLRALLDGAMTTKIIEKLLNDYIEHLNDEEDFNVIVKVEKILDMKTFKTHSVILRNQSLYFHNEF

SEQ ID NO: 3948 - protein, 326 aa, Gigaspora margarita
MGQGSWVFSSDICTNDNKTGELAKELLSIVTVFVARHNGLHSAANCKRRKETAQEIQKFQEGSNETSSRQGTTHSSFSHPGGTYNQSLIAVEKEGVKRKRKDLRACCLNAVNFQNKSKLKWILETLYDIRDEATNVYLKDISLISRLVINHLGEFYLCIPESLEIRAENQDYLHILTTIKKNGGSGVIALDPGIRTFMTGYDPSGMAIEWGKNDICRIYRLCHIQTNRLRRVMLLSSSRMSLQREPCVRGRFRQYLSHKAREHPWCRIILCTEEYTSITCGFCGYIYRKLGGSKAFRCPEYKTELDRDINGARNILLRYLTKKESV

SEQ ID NO: 3949 - protein, 585 aa, Gigaspora margarita
MFLTATQASXTLGVSSCTLRRWHRKGKIAAFHSPGGVRLYDVSNIVGSTTTTSSSSSSSSTPKSYVYARVSSSKQKADLERQQEFLLTKCPQHELVSDIGSGINFKRPGLRTILEQASRRMVAEVVVSHRDRLCRFAYDLIEYILKLNGAKLVVLSQDGSSNDETELCQDILAINTVFVCRMQGKRAARYRQERKKQQQKTQETIEINSPLKTPKEDRSNSIPKDQSVPEFLTENIVETMDGLVYNMVVANFNHGHLSTRQYWFRSLLKLKMLHEWNFMKGCPYEVLDHAITHAIQARDEVICRNNELNSDKHHLHFQRKKNNQQTITIRSKSCCKSGSLKFYVRSLHNNQITMSINRHKDNNPLFFPLHHEQRRKNHNWPNLEGKVKMDSKLMFNRKLGYWTFVWGCGWFGNLDINRVFRLSLFLDDLISRTTQAPPKKRNSMKRAQARLQCRIQNLVEECHKKVTLWFLTNFDVIIIPPFNGSAMSHRLNRKINSKTVRKMLTWSHSRFRKRLIFKAEELGKKVIIQNEAYTSKTCSCCGFIKHNLGGSKVFRCNECGVVIDRDFNGARGIFLRALLDGAVCI

SEQ ID NO: 3950 - protein, 608 aa, Gigaspora margarita
MFLTATQASFTLGVSSYRLRRWHRKGKIAAFHSPGGVRLYDVSNIVGSIITTTTTTSSSSSSSSTPKSYVYTRVSSSKQKADLERQQEFLLTKCPQHELVSDIGSGINFKRPGLCTILEQASRRMVAEVVVAHRDRLCRFAYDLIEYILKLNGAKLLVLSQDGSSNDETELCQDILAINTVFVCRMQGKRAASSRKHKKPLKSTRRSKRQKKTDLTRSLKIRVYPNSSQKTLLKQWMGCARLVYNMVVANFNHGHLSTRQYWFRSLLKLKMLHEWNFMKGCPYEVLDHAITHAIQARDEVICRNNELNSDKHHLHFQRKKNNQQTITIRSKSCCKSGSLKFYVRSLHNNQITMSINRHKDNNPLFFPLHHEQRRKNHNWLNLEGKVKMDSKLMFNRKLGYWTFVWVYGKNVENCNDIQVAENLNIVAIDPGVRTGWSWYSPSKGCGWFGNLDINRVFRLSLFLDDLISRTTQAPPKKRNSMKRAQARLQCRIQNLVEECHKKVTLWFLTNFDVIIIPPFNGSAMSHRLNRKINSKTVRKMLTWSHSRFRKRLIFKAEELGKKVIIQNEAYTSKTCSCCGFIKHNLGGSKVFRCNECRVVIDRDFNGAR

SEQ ID NO: 3951 - protein, 626 aa, Gigaspora margarita
MFLTATQASSTLGVSSCTLRRWHRKGKIAAFHSPGGVRLYDVSNIVGSTTTTTTSSSSSSSSSTPKSYIYARVLSSKQKADLERQQEFLLTKCPQHELVSDIGSGINFKRPGLRTILEQASRRXVAEVXVAHRDRLCRFAYDLIEYILKLNGAKLVVLSQDGSSNDETELCQDILAINTVFVCRMQGKRAARYRQERKKQQQKTQETIEINSPLKTPKEDRSNSIPKDQSVPEFLTENIVETMDGLVYNMVVANFNHGHLSTRQYWFRSLLKLKMLHEWNFMKGCPYEVLDHAITHAIQARDEVICRNNELNSDKHHLHFQRKKNNQQTITIRSKSCCKSGSLKFYVRSLHNNQITMSINRHKDNNPLFFPLHHEQRRKNHNWPNLEGKVKMDSKLMFNRKLGYWTFVWVYGKNVENCNDIQVAENLNIVAIDPGVRTGWSWYSPSKGCGWFGNLDNNRVFRLSLFLDDLISRTTQAPPKKRNSMKRAQARLQCRIQNLVEECHKKVTLWFLTNFDVIIIPPFNGSAMSHRLNRKINSKTVRKMLTWSHSRFRKRLIFKAEELGKKVIIQNEAYTSKTCSCCGFIKHNLGGSKVFRCNECRVMIDRDFNGARGIFLRALLDGAVCI

SEQ ID NO: 3952 - protein, 625 aa, Gigaspora margarita
MFLTATQASSTLGVSSCTLRRWHRKGKIAAFHSPGGVRLYDVSNIVGSTTTTTTSSSSSSSSTPKSYVYARVSSSKQKADLERQQEFLLTKCPQHELVSDIGSGINFKRPGLRTILEQASRRMVAEVVVAHRDRLCRFTYDLIEYILKLNGAKLVVLSQDGSSNDETELCQDILAINTVFVCRMQGKRAARYRQERKKQQQKTQETIEINSPLKTPKEDRSNSIPKDPSVLEFLTENIVETMDGLVYNMVVANFNHGHLSTRQYWFRSLLRLKMLHEWNFMKGCPYEVLDHAITHAIQARDEVICRNNELNSDKHHLHFQRKKNNQQTITIRSKSCCKSGSLKFYVRSLHNNQITMSINRHKDNNPLFFPLHHEQRRKNHNWPNLEGKVKMDSKLMFNRKLGYWTFVWVYGKNVENCNDIQVAENLNIVAIDPGVRTGWSWYSPSKGCGWFGNLDINRVFRLSLFLDDLISRTTQAPPKKRNSMKRAQARLQCRIQNLVEECHKKVTLWFLTNFDVIIIPPFNGSAMSHRLNRKINSKTVRKMLTWSHSRFRKRLIFKAEELGKKVIIQNEAYTSKTCSCCGFIKHNLGGSKVFRCNECRVVIDRDFNGARGIFLRALLDGAVCI

SEQ ID NO: 3953 - protein, 384 aa, Gigaspora margarita
MDGLVYNMVVANFNHGHLSTRQYWFRSLLKLKMLHEWNFMKGCPYEVLDHAITHAIQARDVVICQNNELNSDKHHVHFQRKKNNQQTITIRSKSCCKSGSLKFYVRSLHNNQITMSINHHKDNNPLFFPLHHEQRRKNHNWPNLEGKVKMDSKLMFNRKLGYWTFVWVYGKNVENCNDIQVAENLNIVAIDPGVRTGWSWYSPSKGCGWFGNLDINRVFRLSLFLDDLISRTTQAPPKKRNSMKRAQARLRCRIQNLVEEYHKKVTLWFLTNFDVIIIPPFNGSAMSHRLNQKINSKTVRKMLTWSHSRFRKRLIFKAEELGKKVIIQNEAYTSKTCSCCGFIKHNLGGSKVFRCNECRVVIDRDFNGARGIYLRALLDGAVCI

SEQ ID NO: 3954 - protein, 625 aa, Gigaspora margarita
MFLTATQASSTLGVSSCTLRRWHHKGKIAAFHSPGGVRLYDVSNIVGSTTTTTTSSSSSSSSTPKSYVYARVSSSKQKADLERQQEVLLTKCPQHELVSDIGSGINFKRPGLRTILEQASRRMVAEVVVAHRDRLCRFAYDLIEYILKLNGAKLVVLSQDGSSNDETELCQDILAINTVFVCRMQGKRAARYRQERKKQQQKMQETIEINSPLKMPKEDRSNSIPKDQSVPEFLTENIVETMDGLVYNMVVANFNHGHLSTRQYWFRSLLKLKMLHEWNFMKGCPYEVLDHAITHAIQARDEVICRNNELNSDKHHLHFQRKKNNQQTIAIRSKSCCKSGSLKFYVRSLHNNQITMSINRHKDNNPLFFPLHHEQCRKNHNWPNLEGKVKMDSKLMFNRKLGYWTFVWVYGKNVENCNDIQVAENLNIVAIDPGVRTGWSWYSPSKGCGWFGNLDINHVFRLSLFLDDLISRTTQAPPKKRNSMKRAQARLQCRIQNLVEECHKKVTLWFLTNFDVIIIPPFNGSAMSHRLNRKINSKTVRKMLTWSHSRFRKRLIFKAEELGKKVIIQNEAYTSKTCSCCGFIKHNLGGSKVFRCNECRVVIDRDFNGARGIFLRALLDGAVCI

SEQ ID NO: 3955 - protein, 625 aa, Gigaspora margarita
MFLTATQASSTLGVSLCTLRRWHRKGKIAAFHSPGGVRLYDVSNIVGSTTTTTTTSSSSSSSTPKSYVYARVSSSKQKADLERQQEFLLTKCPQHELVSDIGSGINFKRPGLRTILEQASRRMVAEVVVAHRDRLCRFAYDLIEYILKLNGAKLVVLSQDGSSNDETELCQDILAINTVFVCRMQGKRAARYRQERKKQQQKTQETIEINSPLKTPKEDRSNSIPKDQSVPEFLTENIVETMDGLVYNMVVANFNHGHLSTRQYWFRSLLKLKMLHEWNFMKGCPYEVLDHAITHAIQARDEVICRNNELNSDKHHLHFQRKKNNQQTITIRSKSCCKSGSLKFYVRSLHNNQITMSINRHKDNNPLFFPLHHEQRRKNHNWPNLEGKVKMDSKLMFNRKLGYWTFVWVYGKNVENCNDIQVAENLNIVAIDPGVRTGWSWYSPSKGCGWFGNLDINRVFRLSLFLDDLISRTTQAPPKKRNSMKRAQARLRCRIQNLVEECHKKVTLWFLTNFDVIIIPPFNGSAMSHRLNRKINSKTVRKMLTWSHSRFRKRLIFKAEELGKKVIIQNEAYTSKTCSCCGFIKHNLGGSKVFRCNECRVVIDRDFNGARGIFLRALLDGAVCI

SEQ ID NO: 3956 - protein, 639 aa, Gigaspora margarita
MFLTATQASSTLGVSSCTLRRWHRKGKIAAFHSPGGVRLYDVSNIVAPPPPPPPPPPPPPPLRQRVMSTHEFQVQSRRQTLSGNKSFSSLSVPNTNSSQTLEVVSTSRDPACAPYWNKQVAEWSQKLWLPTGTDYVDSHMISSNTFLNSMVQNSWFSHKMAPPMTKLNSVKISLLSTLSLSVECKESEQQDIDKNEKNSSRKRKKPLKSTRHSKRQKKTDLTRSLKIRVYPNSSQKTLLKQWMGCARLVYNMVVANFNHGHLSTHQYWFRSLLKLKMLHEWNFMKGCPYEVLDHAITHAIQAQDEVICRNNELNSDKHHLHFQRKKNNQQTITIRSKSCCKSGSLKFYVRSLHNNQITMSINRHKDNNPLFFPLHHEQRRKNHNWPNLEGKVKMDSKLMFNRKLGYWTFVWVYDTLKQHQSMHGGKNVENCNDIQVAENLNIVAIDPGVRTGWSWYSPSKGCGWFGNLDINRVFRLSLFLDDLISRTTQAPSKKRNSIKRAQARLQCRIKNLVEECHKKVTLWFLTNFDVIIIPPFNGSAMSHRLNRKINSKTVRKMLTWSHSRFRKRLIFKAEELGKKVIIQNEAYTSKTCSCCGFIKHNLGGSKVFRCNECRVVIDRDFNGARGIFLRALLDGAVCI

SEQ ID NO: 3957 - protein, 546 aa, Gigaspora margarita
MIPQPPPLPKRKVFYTHVPQVKKKTLKDRNRSLNPDSRIMSSSMMSVQVSTSKKTDLRPYWNNQVKEWSQKLWLPTMTDSADSHLTSLNLCSHYTLRNSWFSSTNQVPTNMKYHKISLQSTPSLSVEYKEEDQLCTEESGKPKTIKAXSKKKXKIETTVNRTLSIKTYPNHSQKKILKRWLGLMRYAYNTVVRWNKNRRFCNSSKNFEWIKPYTLNEKLKLYTDIKEGKDLHVYGENKDLRQTMTIRAQNFSKKDWNHFYVTHLHNSSTLLSKRCKPNDFEGGKRDLCPFHFEKKRKHNKWPSQRIDCDCKLTYLHKTNEWIFYWVYEAQKQIRETQADVHVVSIDPGVRTPFTWYSSTKGAGKIGEYDIGRIFRLCKHMDDLISKKDRLASSISKRKKKKALRVDKAIFRMKRKIRRLQEEIHRKTIKFLTDEFDMIIIPSFEVSNMVNRKTRKITRKTVRKMLCWSHYKFRQRLISKAEEKGINVIIQNEAYTSKTCSWCGNIQNIGGSETYKCKNCNIKIDRDVNGARGIFLRALLDGAMILS

SEQ ID NO: 3958 - protein, 600 aa, Gigaspora margarita
MIPQPPPLPKRKVSYTHVTKVTNKRKTFKDRNRSLNPDSRIMGSSGQVSTSKEMDLRPYWNDQVKEWSQKLWLPTVTDSADSHLTSLNLCSHYTLQDLWFSSTNQVPTNMNYHKISLLSLSVEEEQLCTEESGKRKLKTINARSKKKQKIETTVNRTLSIKTYPNHSQKKILKRWLGLTRYAYNTVVRWDKSRRFCNSSKNFEWIKPHTLNEKLKLYIDVKDKKLQRSCVWGERKFLRTVAWLELRLKGLHDKVPANIIDESIDDALKARKNIIQKNLKETKKSSLSFKSKKDLRQTMTIRMQNFSKKDWNHFYVTQLHSSLTLLSKRCKSNKLESGKRDLRPFHFEKKRKHNKWPLQKIDCDCKLTYLRKTNEWIFHWVYEAQKQIRETQADVHVIAIDPGVRTPFTWYSSTKGVGKIEEYDIGRIFRLCKHMDNLISKKDRLTYSISKRKKKKALRVDKAIFRMKRKINQLRDEVHRKTIKFLTDEFDMIIIPPFEVSDMVNRKSRKITRKTVRKMLCWSHYKFRQRLISKAEEKGIHVVIQNEAYTSKTCSWCGNIQNIGGSEMYNCKNCSIKIDRDVNGARGIFLRALLDGVMILS

SEQ ID NO: 3959 - protein, 625 aa, Gigaspora margarita
MFLTATQASSTLGVSSCTLRRWHRKGKIAAFHSPGGVRLYDVSNIVGSTTTTTTSSSSSSSSTPKSYVYARVSSSKQKADLERQQEFLLTKCPQHELVSDIGSGINFKRPGLRTILEQASRRMVAEVVVAHRDRLCRFAYDLIEYILKLNGAKLVVLSQDGSSNDETELCQDILAINTVFVCRMQGKRAARYRQERKKQQQKTQETIEINSPLKTPKEDRSNSIPKDQSVPEFLTENIVETMDGLVYNMVVANFNHGHLSTRQYWFRSLLKLKMLHEWNFMKGCPYEVLDHAITHAIQARDEVICRNNELNSDKHHLHFQRKKNNQQTITIRSKSCCKSGSLKFYVRSLHNNQITMSINRHKDNNPLFFPLHHEQRRKNHNWPNLEGKVKMDSKLMFNRKLGYWTFVWVYGKNVENCNDIQVAENLNIVAIDPGVRTGWSWYSPSKGCGWFGNLDINRVFRLSLFLDDLISRTTQAPPKKRNSMKRAQARLRCRIQNLVEECHKKVTLWFLTNFDVIIIPPFNGSAMSHRLNRKINSKTVRKMLTWSHSRFRKRLIFKAEELGKKVIIQNEAYTSKTCSCCGFIKHNLGGSKVFRCNECRVVIDRDFNGARGIFLRALLDGAVCI

SEQ ID NO: 3960 - protein, 623 aa, Gigaspora margarita
MFLTATQASSTLGVSSCTLRRWHRKGKIAAFHSPGGVRLYDVSNIVGSTTTTSSSSSSSSTPKSYVYARVSSSKQKADLERQQEFILTKCPQHELVSDIGSGINFKRPGLRTILEQASRRMVAEVVVAHRDRLCRFAYDLIEYILKLNGAKLVVLSQDGSSNDETELCQDILAINTVFVCRMQGKRAARYRQERKKQQQKTQETIEINSPLKTPKEDRSNSIPKDQSVPEFLTENIVETMDGLVYNMVVANFNHGHLSTRQYWFRSLLKLKMLHEWNFMKGCPYEVLDHAITHAIQARDEVICRNNELNSDKHHLHFQRKKDNQQTITIRSKSCCKSGSLKFYVRSLHNNQITMSINRHKDNNPLFFPLHHEQRRKNHNWPNLEGKVKMDSKLMFNRKLRYWTFVWVYGKNVENCNDIQVAENLNIVAIDPGVRTGWSWYSPSKGCGWFGNLDINRVFRLSLFLDDLISRTTQAPPKKRNSMKRAQARLQRRIQNLVEECHKKVTLWFLTNFDVIIIPPFNGSAMSHRLNRKINSKTVRKMLTWSHSRFRKRLIFKAEELGKKVIIQNEAYTSKTCSCCGFIKHNLGGSKVFRCNECGVVIDRDFNGARGIFLRALLDGAVCI

SEQ ID NO: 3961 - protein, 626 aa, Gigaspora margarita
MFLTATQASSTLGVSSCTLRRWHRKSKIAAFHSPGGVRLYDVSNIVGSTTTTTTTTSSSSSSSTPKSYVYARVSSSKQKADLERQQEFLLTKCPQHELVSDIGSGINFKRPGLRTILEQASRRMVAEVVVAHRDRLCRFAYDLIEYILKLNGAKLVVLSQDGSSNDETELCQDILAINTVFVCRMQGKRAARYRQERKKQQQKTQETIEINSPLKTPKEDRSNSIPKDQSVPEFLTENIVETMDGLVYNMVVANFNHGHLSTRQYWFRSLLKLKMLHEWNFMKGCPYEVLDHAITHAIQARDEVICRNNELNSDKHHLHFQRKKNNQQTITIRSKSCCKSGSLKFYVRSLHNNQITMSINRHKDNNPLFFPLHHEQRRKNHNWPNLEGKVKMDSKLMFNRKLGYWTFVWVYGKNVENCNDIQVAENLNIVAIDPGVRTGWSWYSPSKGCGWFGNLDINRVFRLSLFLDDLISRTTQAPPKKRNSMKRAQARLRCRIQNLVEECHKKVTLWFLTNFDVIIIPPFNGSAMSHRLNRKINSKTVRKMLTWSHSRFRKRLIFKAEELGKKVIIQNEAYTSKTCSCCGFIKHNLGGSKVFRCNECRVVIDRDFNGARGIFLRALLDGAVCI

SEQ ID NO: 3962 - protein, 512 aa, Gigaspora margarita
MPSSVEYVEEQLCTEENQKRKKMIKTRSKKKQKEEMLLNRTLSIKTYPNHLQKRILKRWLGLTRYAYNTVVRWDKSHRRCDSSKHFEWIKPQTLSKRLKLYIDVKKDKDPKVEDKKLQQLCVWGNVNFFVQLYDKKLQQLCVWGERKFLHTVVWLELHLKGLHDKVPTNVINESIDEALIARKNIIQKNSKETKKSSLSFRSKKGLWQTMTIRVQNFSKKDWNHFYTTYLHNSSTLLSKRYKSNKLESGKRDLRPFHFEKKRKHNKWPLQKIDCDCKLTYIRKTNEWIFYWVYEAQKQIRETQADVHVVSIDPGVRTPFTWYSSTKGVGKIGEYDIGRIFRLXKHMDDLISQKDKLASSISKRKKKKALRVDKAIFRMKRKIKRLQXEIHRKTIKFLTDEFDMIIIPPFEVSGMINRKARKITRKTVXKMLCWSHYKFRQRLISKAEEKGIHVLIQNEAYTSKTCSRCGNIQNIGGSEIYKCKNCDIKIDRDVNGARGIFFRALLDGAMILS

SEQ ID NO: 3963 - protein, 627 aa, Gigaspora margarita
MFLTATQASSTLGVSSCTLRRWHRKGKIAAFHSPGGVRLYDVSNIVGSTTTTTTTSSSSSSSSSTPKSYVYARVSSSKQKADLERQQEFLLTKSPQHELVSDIGSGINFKRPGLRTILEQASRRMVAEVVVAHRDRLCRFAYDLIEYILKLNGAKLVVLSQDGSSNDETELCQDILAINTVFVCRMQGKRAARYRQERKKQQQKTQETIEINSPLKTPKEDRSNSIPKDQSVPEFLTENIVETMDGLVYNMVVANFNHGHLSTRQYWFRSLLKLKMLHEWNFMKGCPYEVLDHAITHAIQARDEVICRNNELNSDKHHLHFQRKKNNQQTITIRSKSCCKSGSLKFYVRSLHNNQITMSINRHKDNNPLFFPLHHEQRRKNHNWPNLEGKVKMDSKLMFNRKLGYWTFVWVYGKNVENCNDIQVAENLNIVAIDPGVRTGWSWYSPSKGCGWFGNLDINRVFRLSLFLDDLISRTTQAPPKKRNSMKRAQARLQCRIQNLVEECHKKVTLWFLTNFDVIIIPPFNGSAMSHRLNRKINSKTVRKMLTWSHSRFRKRLIFKAEELGKKVIIQNEAYTSKTCSCCGFIKHNLGGSKVFRCNECRVVIDRDFNGARGIFLRALLDGAVCI

SEQ ID NO: 3964 - protein, 465 aa, Gigaspora margarita
MVLFNESSSDEHEVSQDIFAINTVFKKILKRWLGLMRYAYNTVVRWNKNRRFCNSSKNFEWIKPYTLNEKLKLYTDIKEGKDLNEKDKKLRRSCVWGERKFLRTVVWLELRLKGLHDKVPANIIDESIDDALIARKNIIQKNLKDTKKSFLSFKSKKDLRQTMTIRAQNFSKKDWNYFYVMHLHNSLTLLSKRCKPNDFEGGKRDLCPFHFEKKRKHNKWPSQRIDCDCKLTYLHKTNEWIFYWVYKAQKQIRETQADVHVVSIDPGVRTPFTWYSSTKGAGKIGEYDIGRIFRLCKHMDDLISKKDRLASSISKRKKKKALRVDKAIFRMKRKIRRLQEEIHRKTIKFLTDEFDMIIIPSFEVSNMVNRKTRKITRKTVRKMLCWSHYKFRQRLISKAEEKGINVIIQNEAYTSKTCSWCGNIQNIGGSETYKCKNCNIKIDRDVNGARGIFLRALLDGAMILS

SEQ ID NO: 3965 - protein, 613 aa, Gigaspora margarita
MIPQPPPLPKRKVFYTHVPQVKKKTLKDRNRSLNPDSRIMSSSMMSVQVSTSKKTDLRPYWNNQVKEWSQKLWLPTMTDSADSHLTSLNLCSHYTLRNSWFSSTNQVPTNMKYHKISLQSTPSLSVEYKEEDQLCTEESGKPKTIKARSKKKRKIETTVNRTLSIKMYPNHSQKKILKRWLGLMRYAYNTVVRWNKNRRFCNSSKNFEWIKPYTLNEKLKLYTDIKEGKDLNEKDKKLRRSCVWGEXKFLRTVVWLELRLKGLHDKVPANIIDESIDDALIARKNIIQKNLKDTKKSFLSFKSKKDLRQTMTIRAQNFSKKDWNHFYVTHLHNSSTLLSKRCKPNDFEGGKRDLCPFHFEKKRKHNKWPSQRIDCDCKLTYLHKTNEWIFYWVYEAQKQIRETQXDVHVVSIDPGVRTLFTWYSSTKGAGKIGEYDIGRIFRLCKHMDDLISKKDRLASSISKRKKKKALRVDKAIFRMKRKIRXLQEEIHRKTIKFLTDEFDMIIIPSFEVSNMVNRKTXKITRKTVRKMLCWSHYKFRQRLISKAEEKGINVIIQNEAYTSKTCSWCGNIQNIGGSETYKCKNCNIKIDRDVNGARGIFLRALLDGAMILS

SEQ ID NO: 3966 - protein, 546 aa, Gigaspora margarita
MFLTATQASSTLGVSSCTLRRWHRKGKIAAFHSPGGVRLYDVSNIVGSTTTTTTSSSSSSTPKSYVYARVSSSKQKADLERQQEFILTKCPQHELVSDIGSGINFKRPGLRTILEQASRRMVAEVVVAHRDRLCRFAYDLIEYILKLNGAKLVVLSQDGSSNDETELCQDILAINTVFVCRMQGKRAARYRQERKKQQQKTQETIEINSPLKTPKEDRSNSIPKDQSVPEFLTENIVETIDGLVYNMVVANFNHGHLSTRQYWFRSLLKLKMLHEWNFMKGCPYEVLDHAITHAIQARDEVICRNNELNSDKHHLHFQRKKLLTLSFIIIAGKNVENCNDIQVAENLNIVAIDPGIRTGWSWYSPSKGCGWFGNLDINRVFRLSLFLDDLISRTTQAPPKKRNSMKRAQARLQRRIQNLVEECHKKVTLWFLTNFDVIIIPPFNGSAMSHRLNRKINSKTVRKMLTWSHSRFRKRLIFKAEELGKKVIIQNEAYTSKTCSCCGFIKHNLGGSKVFRCNECGVVIDRDFNGARGIFLRALLDGAVCI

SEQ ID NO: 3967 - protein, 628 aa, Gigaspora margarita
MFLTATQASSTLGVSSCTLRRWHRKGKIAAFHSPGGVRLYDVSNIVGSTTTTTTTSSSSSSSSSSTPKSYVYARVSSSKQKADLERQQEFLLTKCPQHELVSDIGSGINFKRPGLRTILEQASRRMVAEVVVAHRDRLCRFAYDLIEYILKLNGAKLVVLSQDGSSNDETELCQDILAINTVFVCRMQGKRAARYRQERKKQQQKTQETIEINSPLKTPKEDRSNSIPKDQSVPEFLTENIVETMDGLVYNMVVANFNHGHLSTRQYWFRSLLKLKMLHEWNFMKGCPYEVLDHAITHAIQARDEVICRNNELNSDKHHLHFQRKKNNQQTITIRSKSCCKSGSLKFYVRSLHNNQITMSINRHKDNNPLFFPLHHEQRRKNHNWPNLEGKVKMDSKLMFNRKLGYWTFVWVYGKNVENCNDIQVAENLNIVAIDPGVRTGWSWYSPSKGCGWFGNLDINRVFRLSLFLDDLISRTTQAPPKKRNSMKRAQARLQCRIQNLVEECHKKVTLWFLTNFDVIIIPPFNGSAMSHRLNRKINSKTVRKMLTWSHSRFRKRLIFKAEELGKKVIIQNEAYTSKTCSCCGFIKHNLGGSKVFRCNECRVVIDRDFNGARGIFLRALLDGAVCI

SEQ ID NO: 3968 - protein, 465 aa, Gigaspora margarita
MFLTATQASSTLGVSSCTLRRWHRKGKIAAFHSPGGVRLYDVSNIVGSTTTTTTSSSSSSSTPKSYVYARVSSSKQKADLERQQEFLLTKCPQHELVSDIGSGINFKRPGLRTILEQASRRMVAEVVVAHRDRLCRFAYDLIEYILKLNGAKLVVLSQDGSSNDETELCQDILAINTVFVCRMQGKRAARLVYNMVVANFNHGHLSTRQYWFRSLLKLKMLHEWNFMKGCPYEVLDHAITHAIQARDEVICRNNELNSDKHHLHFQRKKLLTLSFIIIAGKNVENCNDIQVAENLNIVAIDPGVRLGILHPRVVVAPPKKRNSMKRAQARLQCRIQNLVEECHKKVTLWFLTNFDVIIIPPFNGSAMSHRLNQKINSKTVHKMLTWSHSRFRKRLIFKAEELGKKVIIQNEAYTSKTCSCCGFIKHNLGGSKVFRCNECRVVIDRDFNGARGIFLRALLDGAVCI

SEQ ID NO: 3969 - protein, 626 aa, Gigaspora margarita
MFLTATQASSTLGVSSCTLRRWHRKGKIAAFHSPGGVRLYNVSNIVGSTTTTTTSSSSSSSSSTPKSYVYARVSSSKQKADLERQQEFLLTKCPQHELVSDIGSGINFKRPTLRTILEQASRRMVAEVVVAHRDRLCRFAYDLIEYILKLNGAKLVVLSQDGSSNDETELCQDILAINTVFVCRMQGKRAARYRQERKKQQQKMQETIEINSPLKTPKEDRSNSIPKDQSVPEFLTENIVETMDGLVYNMVVANFNHGHLSTRQYWFRSLLKLKMLHEWNFMKGCPYEVLDHAITHAIQAWDEVICRNNELNSDKHHLHFQRKKNNQQTITIRSKSCCKSGSLKFYVRSLHNNQITISINRHKDNNPLFFPLHHEQRRKNHNWPNLEGKVKMDSKLMFNRKLGYWTFVWVYGKNVENCNDIQVAENLNIVAIDPGVRTGWSWYSPSKGCGWFGNLDINRVFRLSLFLDDLISQTTQAPPKKRNSMKRAQARLQCRIQNLVEECHKKVTLWFLTNFDVIIIPPFNGSAMSHRLNQKINSKTVRKMLTWSHSRFRKRLIFKAEELGKKVIIQNEAYTSKTCSCCGFIKHNLGGSKVFRCNECRVVIDRDFNGARGIFLRALLDGAVCI

SEQ ID NO: 3970 - protein, 627 aa, Gigaspora margarita
MFLTATQASSTLGVSSCTLRRWHRKGKIAAFHSPGGVRLYDVSNIVGSTTTTTTSSSSSSSSSSTPKSYVYARVSSSKQKADLERQQEFLLTKCPQHELVSDIGSGINFKRPGLRTILEQASRRMVAEVVVAHRDRLCRFAYDLIEYILKLNGAKLVVLSQDGSSNDETELCQDILAINTVFVCRMQGKRAARYRQERKKQQQKTQETIEINSPLKTPKEDRSNSIPKDQSVPEFLTENIVETMDGLVYNMVVANFNHGHLSTRQYWFRSLLKLKMLHEWNFMKGCPYEVLDHAITHAIQARDEVICRNNELNSDKHHLHFQRKKNNQQTITIRSKSCCKSGSLKFYVRSLHNNQITMSINRHKDNNPLFFPLHHEQRRKNNNWPNLEGKVKMDSKLMFNRKLGYWTFVWVYGKNVENCNDIQVAENLNIVAIDPGVRTGWSWYSPSKGCGWFGNLDINRVFRLSLFLDDLISRTTQAPPKKRNSMKRAQARLQCRIQNLVEECHKKVTLWFLTNFDVIIIPPFNGSAMSHRLNRKINSKTVRKMLTWFHSRFRKRLIFKAEELGKKVIIQNEAYTSKTCSCCGFIKHNLGGSKVFRCNECRVVIDRDFNGARGIFLRALLDGAVCI

SEQ ID NO: 3971 - protein, 629 aa, Gigaspora margarita
MFLTATQASSTLGVSSCTLRXXXRKGKIAAFHSPGGVRLYDVSNIVGSTTTTTTTSSSSSSSSSSSTPKSYVYARVSSSKQKADLERQQEFLLTKCPQHELVSDIGSGINFKRPGLRTILEQASRRMAAEVVVAHRDRLCRFAYDLIEYILKLNGAKLVVLSQDGSSNDETELCQDILAINTVFVCRMQGKRAARYRQERKKQQQKTQETIEINSPLKTPKEDRSNSIPKDQSVPEFLTENIVETMDGLVYNMVVANFNHGHLSTRQYWFRSLLKLKMLHEWNFMKGCPYEVLDHAITHAIQARDEVICRNNELNSDKHHLHFQRKKNNQQTITIRSKSCCKSGSLKFYVRSLHNNQITMSINRHKDNNPLFFPLHHEQRRKNHNWPNLEGKVKMDSKLMFNRKLGYWTFVWVYGKNVENCNDIQVAENLNIVAIDPGVRTGWSWYSPSKGCGWFGNLDINRVFRLSLFLDDLISRTTQAPPKKRNSMKRAQARLQCRIQNLVEECHKKVTLWFLTNFDVIIIPPFNGSAMSHRLNRKINSKTVRKMLTWSHSRFRKRLIFKAEELGKKVIIQNEAYTSKTCSCCGFIKHNLGGSKVFRCNECRVVIDRDFNGARGIFLRALLDGAVCI

SEQ ID NO: 3972 - protein, 208 aa, Gigaspora margarita
MPYNIQDEAMNDLLKEYASNIAAKXSLSEQLGHDSCLVMNHLGKFYLCILVELEKQAKTQGSLFSKNQEKGESGVIALDPGVHTFMTNYDPSGIAIEWEKNNINQIYQLCHVYDRLQSKQDIIHGKENKHKCYRLWCVILDIHKRICYLVHECYXEYTNKTCEFCDNVYHKLGGSKVFYCPEYKTELDRDINGARNILLRYLTKKESV

SEQ ID NO: 3973 - protein, 573 aa, Gigaspora margarita
MIPPSPPLPLKNSYASQKQKRISNGKRKSYTKSIQAVNSSAISDQSNANVYKPKPYWNDRAKEWSEKLWLPIMNDYAGSPTNCSSTYSPSTLQNSWFSSTTRRPMNMSYPKISLPPIPSSPIECQEPSTEEKGKKRKKIFTVRKNKKRKQDEAVNRTLKVKLYPNLAQKRLLKQWMGLARLIYNTIIDYLQNRRILIVRADKKKNNRKDRIKFPKIQFLRTIVYLKLRSKKVYDDIPHNIITETVDEAVKNFNSKENKTKLKFKTRKDLKHTITIRAQNFSKKDWNRFFVTFLFNSSMRTPRKKPYDHKIYSRDLRALHFETKRKNNGWPLEKIDSDCKLTYFRKTNEWILSWVHERQKESKKIHERFVAIDPGVRTPFTTYSPSEGTCEIGKSDSQRLIRLAYHADKLNSKRDKLNSSSSKRKKKKAIRIDKAISRIFRKIKNLRNELHRKNVNYLIKNYDVVIIPEFGVKNMIKKEKRKINSKVVRSMLTWSHYLFRQRLKAKAEETGVEVIIQDEAYTSKTCSWCGNIQNIGGRKIYKCKNCNLIIDRDVNGARGIFLRALLDGAICMHM

SEQ ID NO: 3974 - protein, 976 aa, Gigaspora margarita
MFLTATQASSTLGVSSCTLRRWHRKGKIAAFHSPGGVRLYDVSNIMGSTTTTTTSSSSSSTPKSYVYARVSSSKQKADLERQQEFLLTKCPQHELVSDIGSGINFKRPGLRTILEQASRRMVAEVVVAHRDRLCRFAYDLIEYILKLNGAKLVVLSQDGSSNDETELCQDILAINTVFVCRMQGKRAARYRQERKKQQQKTQETIEINSPLKTPKEDRSNSIPKDQSVPEFLTENIVETMDGLVYNMVVANFNHGHLSTRQYWFRSLLKLKMLHEWNFMKGCPYEVLDHAITHAIQARDEVICRNNELNSDKHHLYFQRKKDNQQTITIRSKSCCKSGSLKFYVCSLHNNQITMSINRHKDNNPLFFPLHHEQRRKNHNWPNLEGKVKMDSKLMFNRKLGYWTFVWYMLLTLSFIIIAGKNVENCNDIQVAENLNIVAIDPGVRTGWSWYSPSKGCGWFGNLDINLVFRLSLFLDDLISRTTQAPPKKRNSMKRAQARLQRRIQNLVEECHKKVTLWFLTNFDVIIIPPFNGSAMSHRLNRKINSKTVHKMLTWSHSRFRKRLIFKAEELGKKVIIQNEAYTSKTCSCCGFIKHNLGGSKVFRCNEYGVVINRDFNGARGIFLRALLDGAVCSTKRNFEITIMILPLRRGRRRVRKTNQGSKKDSKENSEENSADGSNDDEDDEFIDDGTSDALKNQSFDDFTSVNEDNSNKDEFNNSDKVLFTKRLLHSFIIDPDDQYVQSGFTQEELKENIETTTSPQELQIEDDLLNYINTFAKDSTKDVREALYAPHPKFCREYDPFKDFAYEHVRTTVSDWVRLLEMQPNPLNLRDFPESWYRINVWRSLDIAFSDMRSVFFVGKKGDGYLREFGSTITDWAATEAGHKWDGEKGTKLLKECGLSLPKNLKDIFISLSRKINFCEEKIRKIRVPGFILSVVNGAFSNDNNVNRWKNSGRKPQEIIIPDCHQTPKKGKKGRS

SEQ ID NO: 3975 - protein, 629 aa, Gigaspora margarita
MFLTATQASSTLGVSSCTLRRWHRKGKIAAFHSPGGVRLYDVSNIVGSTTTTTSSSSSSSSSSTPKSYVYARVSSSKQKADLERQQEFLLTKCPQHELVSDIGSGINFKRPGLRTILEQASRRMVAEVVVAHRDRLCRFAYDLIEYILKLNGAKLVVLSQDGSSNDETELCQDILAINTVFVCRMQESEQQDIDKNEKNSSRKRKKPLKSTRRSKRQKKTDLTRSLKIRVYPNSSQKTLLKQWMGCARLVYNMVVANFNHGHLSTRQYWFRSLLKLKMLHEWNFMKGCPYEVLDHAITHAIQARDEVICRNNELNSDKHHLHFQRKKNNQQTITIRSKSCCKSGSLKFYVRSLHNNQITMSINRHKDNNPLFFPLHHEQRRKNHNWPNLEGKVKMDSKLMFNRKLGYWTFVWVYGKNVENCNDIQVAENLNIVAIDPGVRTGWSWYSPSKGCGWFGNLDINRVFRLSLFLDDLISRTTQAPPKKRNSMKRAQARLQCRIQNLVEECHKKVTLWFLTNFDVIIIPPFNGSAMSHRLNRKINSKTVRKMLTWSHSRFRKRLIFKAEELGKKVIIQNEAYTSKTCSCCGFIKHNLGGSKVFRCNECRVVIDRDFNGARGIFLRALLDGAVCI

SEQ ID NO: 3976 - protein, 626 aa, Gigaspora margarita
MFLTATQASSTLGVSSCTLRSWHRKGKIAAFHSPGGVRLYDVSNIVGSTTTTTTTSSSSSSSSTPKSYVYARVSSSKQKADLERQQEFLLTKCPQHELVSDIGSGINFKRPGLRTILEQASRRMVAEVVVAHRDRLCRFAYDLIEYILKLNGAKLVVLSQDGSSNDETELCQDILAINTVFVCRMQGKRAARYRQERKKQQQKMQETIEINSPLKTPKEDRSNSIPKDQSVPEFLTENIVETMDGLVYNMVVANFNHGHLSTRQYWFRSLLKLKMLHEWNFMKGCPYEVLDHAITHAIQARDEVICRNNELNSDKHHLHFQRKKNNQQTITIRSKSCCKSGSLKFYVRSLHNNQITMSINRHKDNNPLFFPLHHEQRRKNHNWPNLEGKVKMDSKLMFNRKLGYWTFVWVYGKNVENCNDIQVAENLNIVAIDPGVRTGWSWYSPSKGCGWFGNLDINRVFRLSLFLDDLISRTTQAPPKKRNSMKRAQARLQCRIQNLVEECHKKVTLWFLTNFDVIIIPPFNGSAMSHRLNRKINSKTVRKMLTWSHSRFRKRLIFKAEELGKKVIIQNEAYTSKTCSCCGFIKHNLGGSKVFRCNECRVVIDRDFNGARGIFLRALLDGAVCI

SEQ ID NO: 3977 - protein, 623 aa, Gigaspora margarita
MFLTATQASSTLGVSLCTLRRWHRKGKIAAFHSPGGVRLYDVSNIVGSTTTTTTTSSSSSTPKSYVYTRVSSSKQKADLERQQEFLLTKCPQHELVSDIGSGINFKRPGLRTILEQASRRMVAEVXVAHRDRLCRFAYDLIEYILKLNGAKLVVLSQDSSSNDETELCQDXLAINTVFVCRMQGKRAARYXQERKKXQQKTQETIEINSPLKXPKEDRSNSIPKDQSVPEFLTENIVETMDRLVYNMVVANFNHGHLSTRQYWFRSLLKLKMLHEWNFMKGCPYEVLDHAITHAIQARDEVICRNNELNSDKHHLHFQRKKNNQQTITIRSKSCCKSGSLKFYVRSLHNNQITMSINRHKDNNPLFFPLHHEQRRKNHNWPNLEEKVKMDSKLMFNRKLGYWTFVWVYGKNVENCNDIQVAENLSIVAIDPGVRTGWSWYSPSKGCGWFGNLDINRVFRLSLFLDDLISRTTQAPPKKQNSMKRAQARLQCHIQNLVEECHKKVTLWFLTNFDVIIIPPFNGSAMSHRLNRKINSKTVRKMLTWSHSRFRKRLIFKAEELGKKVIIQNEAYTSKTCSCCGFIKHNLGGSKVFRCNECRVVIDRDFNGARGIFLRALLDGAVCI

SEQ ID NO: 3978 - protein, 288 aa, Gigaspora margarita
MKFRSKKDPQQSIVIHSKHWGTSRGAFSFLHKMKSAESLSEQLGHDSRLVINRLGEFYLCIPVELEKRAENQGPLFSENQEKDGSGVIVLDPGVRTFMTGYDPSGMAIEWEKNDINRIYRLCHVYDRLQSKRNMIHGKGNKRKRYRLRRVMLRIHKRIRCLVHECHCKLTKWLCENYHIIILPEFRTQRMIRRGQRRIGSKTARAMCTWSHFCFRQHLAHKAREHPWCRIILCTEEYTSKTCRFCSNVYRKLGGSKVFRCPECKTELDRDINGARNILLRYLTKKESV

SEQ ID NO: 3979 - protein, 510 aa, Gigaspora margarita
MIPQPPPLPKRKVSYTHVSKVTNKRKTLKDRNRSLNPDSRIMGSSGQVSTSKEMDLRPYWNDQVKEWSQKLWLPTVTDSADSHLTSLNLCSYYTLQDSWFSSTNQVPTNMNYHKISLPSLSVEEEQLCTEESGKRKRSCVWGERKFLRTVAWLELRLKGLHDKVPANIIDESIDDALIARKNIVQKNLKETKKSSLSFKSKKDLRQTMNIRAQNFSKKDWNHFYVTHLHSSLTLLSKRCKSNKLESGKRDLRPFHFEKKRKHNKWPLQKIDCDCKLTYLRKTNEWIFHWVYEAQKHIRETQADVHVISIDPGVRTPFTWYSSTKGVGKIGEYDIGRIFRLCKHMDNLISKKDRLASSISKRKKKKALRVDKAIFRIKRKIKRLQDEVHRKTIKFLTDEFDMIIIPPFEVSNMVNRKSRKITRKTVRKMLCWSHYKFRQRLISKAEEKGIHVVIQNKAYTSKTCSWCGNIQNIGGSEMFNCKNCGIKIDRDVNGARGIFLRALLDGAMILS

SEQ ID NO: 3980 - protein, 529 aa, Gigaspora margarita
MIPQPPPLLKRKVSYTHVSQVTKKKKTFKDRNRSLNPDSRIISSSMMSGQVSTSKETGLRPYWNDQVKEWSQKLWLPTVTDSANSDLTSLNLCSYHTLQNSWFSSTNKVPTNMNYHKISLQSTPSLSVEHKKEKTKTIKARSKKKQKIETTVNRTLSIKMYPNHSQKKILKRWLGLMRYAYNTVVRRNKNRRFCNSSKHFEWIKPHTLNEKLKLYIDVKEGKDLNEKDKKLQRSCVWGERKFLRTVAWLELRLKGLHDKFFDFLSGKRDLRPFHFEKKRKHNKWPLQKIDCDCKLTYLRKTNEWIFHWVYEAQKQIRETQADVHVIAIDPGVRTPFTWYSSTKGVGKIGEYDIGRIFRLCKHMDNLISKKDRLTSSISKRKKKKALRVDKAIFRMKRKINQLRDEVHRKTIKFLTDEFDMIIIPPFEVSDMVNRKSRKITRKPVRKMLCWSHYKFRQRLISKAKEKGIHVVIQNEAYTSKTCSWCGNIQNIGGSEMYNCKNCGIKIDRDVNGARGIFLRALLDGAMILS

SEQ ID NO: 3981 - protein, 718 aa, Gigaspora margarita
MFLTATQASSTLGVSSCTLRRWHCKGKIAAFHSPGGVRLYDVSNIVGSTTTTTTTSSSSSSSTPKSYVYARGSSSKQKADLERQQEFLLTKCPQHELVSDIGSGINFKRPGLRTILEQASRRMVAEVVVAHRDRLCRFAYDLIEYILKLNGAKLVVLSQDGSSNDETELCQDILAINTVFVCRMQGKRAARYRQERKKQQQKTQETIEINSPLKTPKEDRSNSIPKDQSVPEFLTKNIVETMDGLVYNMVVANFNHGHLSTRQYWFRSLLKLKMLHEWNFMKGCPYEVLDHAITHAIQARDEVICRNNELNSDKHHLHFQRKKNNQQTITIRSKSCCKSGSLKFYVRSLHNNQITMSINRHKDNNPLFFPLHHEQRRKNHNWPNLEGKVKMDSKLMFNRKLGYWTFVWVYGTLRQHQSMQGGKNVENCNDIQVAENLNIVAIDPGVRTGWSWYSPSKGCGWFGNLDINRVFRLSLFLDDLISRTTQAPPKKRNSMKRAQARLRCRIQNLVEECHKKVTLWFLTNFDVIIIPPFNGSAMSHRLNRKINSKTVRKMLTWSHSRFRKRLIFKAEELGKKVIIQNEAYTSKTCSCCGFIKHNLGGSKVFRCNECRVVIDRDFNGARGIFLRALLDGAKELLNCKEESQRLNEMSMTLNDITNIFDADKVLTTKTTNGLSKCESCPEKGKNAIDELEICKSQLHFEEIQALAEIIRKNNTLAI

SEQ ID NO: 3982 - protein, 624 aa, Gigaspora margarita
MFLTATQASSTLGVSSCTLRRWHRKGKIAAFHSPGGVRLYDVSNIVGSTTTTTTSSSSSSSTPKSYVYARVSSSKQKADLERQQEFLLTKCPQHELVSDIGSGINFKRPGLRTILEQASRRMVAEVVVAHRDRLCRFAYDLIEYILKLNGAKLVVLSQDGSSNDETELCQDILAINTVFVCRMQGKRAARYRQERKKQQQKTQETIEINSPLKTPKEDRSNSIPKDQSVPEFLTENIVETMDGLVYNMVVANFNHGHLSTRQYWFRSFLKLKMLHEWNFMKGCPYEVLDHAITHAIQARDEVICRNNELNSDKHHLHFQRKKNNQQTITIRSKSCCKSGSLKFYVRSLHNNQITMSINRHKDNNPLFFPLHHEQRRKNHNWPNLEGKVKMDSKLMFNRKLGYWTFVWVYGKNVENCNDIQVAENLNIVAIDPGVRTGWSWYSPSKGCGWFGNLDINRVFRLSLFLDDLISRTTQAPPKKRNSMKRAQARLQCRIQNLVEECHKKVTLWFLTNFDVIIIPPFNGSAMSHRLNRKINSKTVHKMLTWSHSRFRKRLIFKAEELGKKVIIQNEAYTSKTCSCCGFIKHNLGGSKVFRCNECRVVIDRDFNGARGIFLRALLDGAVCI

SEQ ID NO: 3983 - protein, 542 aa, Gigaspora margarita
MIPQPPLLPKRNTHVSKVTNKRKTLKDRNRSLNPDSRIMSSSDQVSTSKEMDLRPYWNDQVKEWSQKLWLPTVTDSADSHLTSLNLCSHYTLQDSWFSSTNQKKILKRWLGLMRYAYNIVVRWNKNRRFCNSSKNFEWIKPHTLNEKLKLYIDVKEGKDLNEKDKKLQRSCVWGERKFLRTVAWLELRLKGLHDKVPANIIDESIDDALTARKNIIQKNLKETKKSSLSFKSKKDLRQTMTICMQNFSKKDWNHFYVTQLHSSLTLLSKRCKPNKLESGKRDLRPFHFEKKRKHNKWPLQKIDCDCKLTYLRKTNEWIFHWVYEAQKQIRETQADVHVIAIDPGVRTPFTWYSSTKGVGKIGEYDIGRIFRLCKHMDNLISKKDRLTSSISKRKKKKALRVDKAIFRIKRKIKRLRDEVHRKTIKFLTDEFDMIIIPPFKVSGMVNRKSRKITRKTVRKMLCWSHYKFRQRLISKAEEKGIHVVIQNEAYTSKTCSWCGNIQNIGGSEMYNCKNCGIKIDRDVNGARGIFLRTLLDGAMILS

SEQ ID NO: 3984 - protein, 598 aa, Gigaspora margarita
MIPQPPPLLKRKVSYTHVSQVTKKKKTFKDRNRSLNPDSRIISSSMMSGQVSTSKETGLRPYWNDQVKEWSQKLWLPTVTDSANSDLTSLNLCSYHTLQNSWFSSTNKVPTNMNYHKISLQSTPSLSVEHKKEKTKTIKAQSKKKQKIETTVNRTLSIKTYPNHSQKKILKRWLGLMRYAYNTVVRWNKNRRFCNSSKNFEWIKPHTLNEKLKLYIDVKEGKDLNEKDKKLQRSCVWGERKFLRTVAWLELCLKGLHDKVPANIIDESIDDALTARKNIIQKNLKETKKSSLSFKSKKDLWQTMTIRMQNFSKKDWNHFYVTQLHSSLTLLSKRCKPNKLESGKRDLRPFHFEKKRKHNKWPLQKIDCDCKLTYLRKTNEWIFHWIYEAQKQIRETQADVHVIAIDPGVRTPFTWYSSTKGVGKIGEYDIGRIFRLCKHMDNLISKKDRLTSSISKRKKKKALRVDKAIFRMKRKINQLRDEVHRKTIKFLTDEFDMIIIPPFEVSDMVNRKSRKITRKTVRKMLCWSHYKFRQRLISKAEEKGIHVVIQNEAYTSKTCSWCGNIQNIGGSEMYNCKNCGIKIDRCQWRPRDIPSGFA

SEQ ID NO: 3985 - protein, 537 aa, Gigaspora margarita
MIPQPPPLLKRKVSYTHVSQVTKKKKTFKDRNRSLNPDSRIINSSMMSGQVSTSKETGLRPYWNDQVKEWSQKLWLPTVTDSANSDLTLLNLCSYHTLQNSWFSSTNKVPTNMNYHKISLQSTPSLSVEHKKEKTKTIKARSKKKQKIETTVNRTLSIKTYPNHSQKKILKRWLGLMRYAYNTVVRWNKNRRFCNSSKNFEWIKPHTLNEKLKLYIDVKEGKDLNEKDKKLQRSCVWGERKFLRTVAWLELRFKGLHDKVPANIIDESIDDALKARKNIIQKNLKETKKSSLSFKSKKDLRQTMTIRMQNFSKKDWNHFYVTQLHSSLTLLSKRCKSNKLESGKRDLRPFHFEKKRKHNKWPLQKIDCDCKLTYLRKTNEWIFHWVYEAQKQIRETQADVHVIAIDPGVRTPFTWYSSTKGVGKIGEYDIGRIFRLCKHMDNLISKKDRLTSSISKRKKKKALRVDKAIFPEEKGIHVVIQNEAYTSKTCSWCGNIQNIGGSEMYNCKNCGIKIDRDVNGARGIFLRALLDGAMILS

SEQ ID NO: 3986 - protein, 708 aa, Zostera nigricaulis
MTSCPSRPSERSIIYQEPPSCLGKRKDRSRLSRLQADIDDTKSTRFLEELLIKKGERLPTAESALRSRKRICLARKTSCKKDTRNTKSSRTSAPASTSSENRSVKWFNSYCKDLSKSLWYPTETDSAESPLASLSGCVRSTTRNSWSKTTTFDLPKKSLPTTFSPSYTSSVAEGMGSEGTEPRMVTKATKVKILPDKEQEKILRGWFRDARKIYNRVIHLMRTSDDLKITKYNIRNEVSTPATSEFKGTPSKILHQAAFDAYEAYDSNMKKLKIAIKEKKSFGKKKRKKKKKKKAQNEEKVKPKRQRHNRRNKARRQKERARKQNGSLANKPFRLKFKSSRRNRDSIGFQACGVSIINETMVTLFPKTMKDPLRISKYTGDASQSPRICRAYGRYYFCFPEEVESRPPHEGVNREVAIDPGVRKFMAYYSPSGTAGFIGQGANVQSSVKGSRGFVRKTLQHIKNTTGYCGYNCDLHIGERKKKTIGTGMYRQMDIYFSRYNQMRKDMRDLDDMYASFSVQEKCTTRKWYRKKKYSLRKAWHRLMSKASSRMEDFHWKSAQFLLENFDTVYIPKFQVQNMTRKGNLSVKTRKRMLYQRHFSFRQKLKHRANILGKTVIEGSEWGTTKCCGVCGLRNEPGSAEVYSCSGCSVRNVERDLHGARNYYIKEKSRIQDCVDKEVYNFVKSEIRSVVDATLNSICSGTAVTVRK

SEQ ID NO: 3987 - protein, 383 aa, Nymphicus hollandicus
MIKAQVVELKPNKTMQQELDKLCDYRRYCWNQALATWQDMYEARTLDKDNNPSPNERRIRDELVDNKADWQFALSARCLQLAVKDLANAWKNFFDKAQPDWGKPHFKSKKAPRQGFKTDRAKVVNGKLRLDKPRGIKTWFDIPTYEALKMKQIKVASVFRERGHYYAALSYEEETLVKPRTGRKTAVDVNVGHFNYTGGKINVLPSRLQKLYKRIKHYQRMLAKKRRANGKLAGQSNNYVQVRTKLQRDYRKVANIQNDLLQKFTTKLVNNYDQIVIEDLAVKQMMMTHVASKGMQRSLFSKFRQILTYKCEWYGKELILADKTYPSTQRCANCGYVKKGDEKITLQGNQKHHTKHNEYICYECGYTNDRDDNAVLNLLALAK

SEQ ID NO: 3988 - protein, 358 aa, Nymphicus hollandicus
MLDMQIERRKNNPEAKYINGFGMNNLLKRLKQEHPWLKKAESTALQSASRDLDDAFQRFFKGQNDFPRFKSKKYAQSYTSKQVNNNIMVLNNHHIKLPKLGSMYFRAGRLPEGKIKRVTVRQNSAGQYYISILTESENQTLPKTGKQIGGDLGLKALLNLSNGEKIPNHHFNDKLSKKIHHWERLRSRRCLEAKKQIAWDKHNHVLEPRRLSDFKNYRKACRMVAKYKMKVANQQLDQLQKLTTKLVRENDVIVLEKLNVKGMMKNHHLARAIGGVSWSKLVDILQYKCDWYGKKLIQIDPSYTSQICAECGERNNRLGLGKAEWLAVREWDCPHCGSHLDRDINAAKVILKHGLVAQ

SEQ ID NO: 3989 - protein, 396 aa, Neopyropia yezoensis
MRTGDDGKHLQATLEWAARRDTAAYGQRFGAQATRHLRTARVRRAIQRGRFAASVARDLTGGLLRQVRGGGAVVVAMGTARVRRGEAWLRRHLRRLCWFVDQDEFNTSQACSECHDKMVLIYPTGNSPPKIPRELNGPPAGPLPSTRRVRMAAGSRRGRPKRALPSATHVTRRGPDPDAYRAAVRATARAAAVARRAAALAACAVEDRAVYADPRRLSEWAAKGCYTCSLAAPQGPGHPAPHPPVIRNRDDVAACNMAWVAARRLTGTNVWPFKRPFGMRWAWTTKRPPSGVPVPPVRRTRATARVDVWPVLAAVDTVFDGGGGGGGGGGGGGGGGGGGGGRGVVDGDATAASCTTRRGAPGGEQVAAAGSAMDGVRRAETGATGAPRGLVDTARR

SEQ ID NO: 3990 - protein, 327 aa, Neopyropia yezoensis
MGTARVRGGGAWLRRHLRRLCWFVDQDEFNTSKACSECHDKMVLIYSTGNSPPKISRELYGPPAGPLPSTRRVRMAAGSRRGRPKQALPSATHVTRRGPDPDAYQAAVRATARAAAVARRAAALAACAVEDRAVYADPRRLSEWAAKGCYTCSLAAPQGPGHPAPHPPVIRNRDDVAARNMAWVAARRLPGTNVWPFDRPIGMRWAWTTKRPPSGVPVPPVRRTRATTRVDVWPALAAVDTVVDGGGGGGGGGGGGGGGRGVVDGGGGGGGGRGVGDGDATAAACTTRRGAPGGERVAAAGSAMDGVRRAETGATDAPRGLVDTARR

SEQ ID NO: 3991 - protein, 336 aa, Neopyropia yezoensis
MGTERVRGGDAWLRRHLRRLCWFVDQDEFNTSKACSECHDKMVLIYSTGNSSPKIPRELYGPPAGPLPSTRRVRMAAGSRRGRPKRALPSATHVTRRGPDPDAYRAAVRATARAAAVARRAAALAACAVEDRAVYADPRRLSEWAAKGCYTCSLAAPQGPGHPAPHPPVIRNRDDVAARNMAWVAARRLTGTNVWPFKRPFGMRWAWMNKRPPRGVPVPPVRRTRAITRVDVWPVLAAVDTVGDGGGGGGGGGGGGGGGGGGGGGGGGGGGGGGGGGGGGGRGVADGDATAASCTTRRGAPGGERVAAAGSAMDGVRRAETGATDAPRGLVDTARR

SEQ ID NO: 3992 - protein, 390 aa, Neopyropia yezoensis
MRTGDDGKHLQATLEWAARRDTAAYGQRFGAQATRHLRVARVRKAIQRGRFAASVARDLTGGLLRQVRGGGAGVVAMGTARVRGGDAWLRRHLRRLCWLVDQDEFNTSQACSECHDKMVLIYSTGNSPPKIPRELNGPPAGPLPSTRRVRMAAGSRRGRPKRALPSATHVTRRGPDPDAYRAAVRATARAAAVARRAAALAACAVEDRAVYADPRRLSEWAAKGCYTCSLAAPQGPGHPAPHPPVIRNRDDVAARNMAWVAARRLTGTNVWPFKRPFGMRWAWTTKRPPSGVPVPPVRRTRAITRVDVWPVLAAVDTVGDGGGGGGGGGGGGGGGREVVDGDATAASCTTRRSAPGGERVAAAGSTMDGVRRAETGATDAPRGLVDTARR

SEQ ID NO: 3993 - protein, 386 aa, Neopyropia yezoensis
MERAQASWRAVWEASRPVCSKATPEDLFEGTCLKQPTMLDLAAAALTWASFHSTAEYAGAYGKDSLRPLRKARVHRLVQRGRFAAKVARNVGGGFGRRIVDGKAVLVVWGAAATRGGAGALRRRVALGCFLATQDEYNSSQTCADCHCRLVLVYPTDLSPDDRRPVINVAQCAAQARGDADSNKRKVVESQRRAAKGRCGCDGRGRCSPRDVTGRGRAEERDAGEARGRLAEISVSGKRSGGYDVLACWSVKKCVNPDCCRLYFNRDKNAARHIVQVAVSSLLGRSTFPFFRNCHPRWPRAATAQWSRDTTSEWHPPWLVSNSAGGGVGGGGGGGGGGEGGGGTTNPVRATTKLVSVRALDGATAFSRTATSPAGDGGGNCRTVHQ

SEQ ID NO: 3994 - protein, 392 aa, Neopyropia yezoensis
MRTGDGAKHLQATLEWAARRDTAAYGQRFGAQATRHLRTARVRKAIQRGRFAASVARDLTGGLLRQVRGGGAVVVAMGTARVRGGDAWLRRHLRRLCWFVDQDEFNTSQACSECHDKMVLIYSTGNSPPKIPRDLYGPPAGSLPSTRRVRMAAGSRRGRPKRALPSATHVTRRGPDPDAYREAVRATARAAAVARRAAALAACAVEDRAVYADPRRLSEWAAKGCYTCSLAAPQGPGHPAPHPPVIRNRDDVTARNIAWVAARHLTGTNVWPFKRPFGMRWAWTTKRPPSGVPVPPVRRTRATTRVDVWPVLAAVDTVVDGGGSGGGGGGGGGGGGGRGVVDGDATAASCATRRGAPGGEQVAAAGSAMDGVRRAQTGATDAPRGLVDTARR

SEQ ID NO: 3995 - protein, 410 aa, Neopyropia yezoensis
MRTGDDGKHLQATLEWAARRDTAAYGHRFGAQATRHLRAARVRKATQRGRFAASVERDLTGGLLRQVRGGGAVVVAMGTARVCGGDAWLRRHLRRLCWFVDQDEFNTSKACSECHDKMVLIYSTGNSPPKIPRELYGPPAGPLPSTRRVRMAAGSRRGRPERALPSATHVTRRGPDPDAYRAAVRATARAAAVARRAAALAACAVEDRAVYADPRRLSEWAAKGCYTCSLAAPQGPGHPAPHPPVIRNRDDVAARNMAWVAARRLTGTDVWPFKRPFGMRWAWTTKRPPSGVPVPPVRRTRATTRVDVWPVLAAVDTVGDGGGGGGGGGGGGGGGGGGGGGGGGGGGGGGGGGGGRGVVDGDATAASCTTRRGASGGERVAAAGSAMDGVRRAETGATDAPRGLVDTARR

SEQ ID NO: 3996 - protein, 561 aa, Neopyropia yezoensis
MASPGGGHGRVRRGPQASIRRARRTQLATSVRRVLRHTRLSRWTVPRHEAEKVARWLVDPTAAAGNSARRTTPDAPVQDRVHALPRRKGCRRLAPVHGLRYSLSAAHFREASGGTFLARAWKQWRARSGTEAGPVAASVAGLVAAAGDVGGVARHPPPVDLAAAHGTMRTGDDGKHLQATLEWAARRDTAAYGQRFGAKATRHLRTARVRKAIQRGRFAASVARDLTGGLLRQVRGGGAVVVAMVIQRVRGGDAWLRRHLRRLCWFVDHDEFNTSQACSECHDKMVLIYSTGNSPPKIPGELYGPPAGPLPSTRRVRMAAGSRRGRPKRASPSATHVTRRGPDPDAYRAAVRATARAAAVARHAAALAACAVEDRAIYADARRLSEWAAKGCYTCSLAAPQGPGHPAPHPPVIRNRDDVAARNMAWVAALRLTGTNVWPFKRPFGMRWAWTTKRPPSGVPVPPIRRTRATTRVDVWPVLATVDTVGDGGGGGGGGGGGGGGGGGGGRGVVDGDATAASCTTRRGAPGGERVAAAGSSMDGVRRAETGATDAPRGLVDTALR

SEQ ID NO: 3997 - protein, 365 aa, Neopyropia yezoensis
MGTARVRGGDAWLRRHLRRLCWFVDQDEFNTSKACSECHDKMVLIYSTGNPPPKIPRELYGPPAGPLPSTRRVRMAAGSRRGRPKRALPSATHVTRRGPDPDGYREAVRATARAAAVARRAAALAACAVEDRAVYADPRRLSEWAAKGCYTCSLAAPQGPGHPAPHPPVIRNRDDVAARNIAWVAARRLTGTNVWPFKRPFGMRWAWTTKRPPSGVPVPPVRRTRATTRVDVWPVLAAVDTVVDGGGGGGGGGGGGSGGGGRGVVDGDATAASCTTRRGAPGGEQVAAAGSAMDGVRRAETGATDAPRGLVDTAKRQDSAHLARDPHLPRGASAAPFFADEPIMGNCRPFTSRLDAGFSRGPFPG

SEQ ID NO: 3998 - protein, 290 aa, Neopyropia yezoensis
MGTARVRGGDGWLRRHLRRLCWFVDQDEFNTSQACSECHDKMVLIYPTGNSPPKIPRELNGPPAGPLPSTRRVRMAAGSRRGRPKRALPSATHVTRRGPDPDAYREAVRATARAAAVARRAAVLAACAVEDRAVYADPRRLSEWAAKGCYTCSLAAPQGPGHPAPHPPVIRNRDDVAARNIAWVAARRLTGTNVWPFKRPFGMRWAWTTKRPPSGVPVPPVRRTRATTRVDVWPVLAAVDTVVDGGGGGGGGGGGGGRGVAAAGSAMDGVRRAETGATGAPRGLVDTARR

SEQ ID NO: 3999 - protein, 316 aa, Neopyropia yezoensis
MGTARVRGGDAWLRRHLRRLCWFVDQDEFNTSQACSECHDKMVLIYPTGNSPPKIPRELYGPPAGPLPSTRRVRMAAGSRRGRPKRALPSATHVTRRGPDPDAYREAVRATARAAAVARRAAALAACAVEDRAVYADPRRLSEWAAKGCYTCSLAAPQGPGHPAPHPPVIRNRDDVAARNIAWVAARRLTGTNVWPFKRPFGMRWAWTTKRPPSGVPVPPVRRTRATTRVDVWPVLAAVDTVVDGGGGGGGGGGGGGGGGGRGVVDGDATAASCTTRRGAPGGEQVAAAGSAMDGVRRAEAGATDAPRGLVDTARR

SEQ ID NO: 4000 - protein, 597 aa, Neopyropia yezoensis
MRQARRSSPEGSDDDAAAVAPAAAGATTPPEAKTFQTASPGGGHGRVRRGPQASIRRARRTQLATSVRRVLRRTRLSRWTVPRHEAEKVARWLVDPTAAAGDSDSGTTPDAPLLDRVDALPRRKGCRRLAPVPGLRYSLSAAHFREASGGNFLARAWKQWRARSGTGAGPVAAAAVAGLVAAAAGDGGGVAGHLPPVDLAAAHGTMRTGDDGKHLQATLEWAARRDTAAYGQRFGAQATRHLRAARVRKAIQRGRFAASVARDLTGGLLRQVRGGGAVVVAMGTARVRGGDAWLRRHLRRLCWLVDQDEFNTSQACSECHDKMVLIYSTGNSPPKIPRELYGPPAGPLPSTRRVRMAAGSRRGRPKRALPSATHVTRRGPDPDAYREAVRATARAAAVARRAAALAACAVEDRAVYADPRRLSEWAAKGCYTCSLAAPQGPGHPAPHPPVIRNRDDVAARNIAWVAARRLTGTNVRPFKRPFGMRWAWTTKRPPSGVPVPPVRRTRATTRVDVWPVLAAVDTVVDGGGGGGGGGGGGGGGGGRGVVDGDATAASCTTRRGAPGGEQVAAAGSAMDGVRRAETGATDAPRGLVDTARR

SEQ ID NO: 4001 - protein, 390 aa, Neopyropia yezoensis
MRTGDGGKHLQATLEWAARRDTAAYGQRFGAQATRHLRAACVRKAIQRGRFAASVAQDLTGGLLRQVRGGGAVVVAMGTARVRGGDAWLRRHLRRLCWFVDQDEFNTSKACSECHDKMVLIYSTGNSPPKIPRQLYGPPAGPLPSTRRVRMAAGSRRGRPKRALPSATHVTRRGPDPDAYRAAVRATARAAAVARRAAALAACAVEDRAVYADPRRLSEWVAKGCYTCCLAAPQGPGHPAPHPPVIRNRDDVAARNMAWVAARRLTGTNVWPFKRPFDMRWAWTTKRPPSGVPVPPVRCTRAITRVDVWPVLAAVDTVGDGGGGGGGGGGGGGGGREVVDGDATAASCTTRRGAPGGERVAAAGSTMDGVRRAETGATDAPRGLVDTARR

SEQ ID NO: 4002 - protein, 398 aa, Neopyropia yezoensis
MRTGDDGKNLQATLEWAARRDTAAYGQRFGAQATRHLRTARVRKAIQRGRFAASVARDLTGGLLRQVRGGGAVVVAMGTARVRGGDAWLRRHLRRLCWLVDQDEFNTSQACSECHDKMVLIYSTGNSPPKIPGELYGPPAGPLPSTRRVRMAAGSRRGRPKRALPSATHVTRRGTDPDAYRAAVRATARAAAVARRAAALAACAVEDRAVYADPRRLSEWAAKGCYTCSLAAPQGPGHPAPHPPVIRNRDDVAARNMAWVAARRLTGTDVWPFKRPFGMRWAWTTKRPPSGVPVPPVRRTRATTRVDVWPVLAAVDTVVDGGGGGGGGGGGGGGGGGGGGGGGRGVVDGDATAASCTTRRGAPGGERVAAAGSAMDGVRRAETGATDAPRGLVDTARR

SEQ ID NO: 4003 - protein, 316 aa, Neopyropia yezoensis
MGTARVRGGDAWLRRHLRRLCWFVDQDEFNTSQACSECHDKMVLIYPTGNSPPKIPRELNGPPAGPLPSTRRVRMAAGSRRGRPKRALPSATHVTRRGPDPDAYRAAVRATARAAAVAWRAAALAACAVEDRAVYADPRRLSEWVAKGCYTCSLAAPQGPGHPAPHPPVIRNRDDVAARNIAWVAARRLTGTNVWPFKRPFGMRWAWTTKRPPSGVPVPPVRRTRATSRVDVWPVLAAVDTVVDGGGGGGGGGGGGGGGGGRGVVDGDATAASCTTRRGAPGGEQVAAAGSAMDGVRRAETGATGAPRGLVDTARR

SEQ ID NO: 4004 - protein, 321 aa, Neopyropia yezoensis
MGTARVRGGDAWLRRHLRRLCWFVDQDEFNTSQACSECHDKMVLIYPTGNSPPKIPRELNGPPAGPLPSTRRVRMAAGSRRGRPKRALPSATHVTRRGPDPDAYREAVRATARAAAVARRAAALAACAVEDRAVYADPRRLSEWAAKGCYTCSLAAPQGPGHPAPHPPVIRNRDDVAARNMAWVAARRLTGTNVWPFKRPFGMRWAWTTKRPPSGVPVPPVRRTRATTRVDVWPVLAAVDTVGDGGGGGGGGGGGGGGGGGGGGGGRGVVDGDATAASCTTRRGAPGGEQVAAAGSAMDGVRRAATGAADAPGGLVDTARR

SEQ ID NO: 4005 - protein, 394 aa, Neopyropia yezoensis
MRTGDDGKHLQATLEWAARRDTAAYGQRLGAQATRHLRTARVRKAIERGRFAASVARDLTGGLLRQVRGGGAVVVAMGTARVRGGDAWLRRHLRRLCWFVDQDEFNTSQACSECHDKMVLIYSTGNSPPKIPRELYGPPAGPLPSTRRVWMAAGSRRGRPKRALPSATHVTRRGPDPDAYRVAVRATARAAAVARRAAALAACAVEDRAVYADPRRLSEWAAKGCYTCSLAAPQGPGHPAPHPPVIRNRDDVAARNMAWVAARRRTGTNVWPFRRPFGMRWAWTAKRPPSGVPVPPVRRTRATTRVDVWPVLAAVDTVGDGRGGGGGGGGGGGGGGGGGRGVVDGDATAPSSVMRRGAPGGERVAAAGSAMDGVRRAEAGATDAPRGLVDTARR

SEQ ID NO: 4006 - protein, 394 aa, Neopyropia yezoensis
MRTGDDGKHLQATLEWAARRDTAAYGQQFGAQATRHLRTARMHKAIQRGHFAASVARDLTGGLLRQVRGGGAVVVAMGTARVRGGDAWLRSHLRRLCWFFDQDEFNTSQACSECHDKMVLIYPTGNPPPKIPRELNGPPAGPLPSTRRVRMAAGSRRGRPKRALPSATHVTRRGPDPDAYREAVRATARAAAVAQSAAALAACAVEDRAVYADPRRLSEWAAKGCYTCSLAAPQGPGHPAPHPPVIRNRDDVAARNMAWVAARRLTGTNVWPFKRPFGMRWAWTTKRPPSGVPVPPVRRTRATTRVDVWPVLAAVDTVVDGGGVGGGGGGGGGGGGGGGRSVVDGDATAASCTTRRGGPGGERVAGAGSSMDGVRRAETGARDAFRGLVNTARR

SEQ ID NO: 4007 - protein, 390 aa, Neopyropia yezoensis
MRTGDDGKHLQATLEWAARRDTAAYGQRFGAQATRHLRAARVRKAIQRGRFAASVARDLTGGLLRQVRGGGAVVVAMGTERVRGGDAWLRRHLRRLCWFVDQDEFNTSQACSECHDKMVLIYSTGNSPPKIPRELYGPPAGPLPSTRRVRMAAGSRRGRPKRALPSATHVTRRGPDPDAYREAVRATARAAAVARRAAALAACAVEDRAVYADPRRLSEWAAKGCYTCSLAAPQGPGHPAPHPPVIRNRDDVAARNIAWVAARRLTGTNVWPFKRPFGMRWAWTTKRPPSGVPVPPVRRTRATTRVDVWPVLAAVDTVVDGGGGGGGGGGGGGGGRGVVDGDATAASCTTRRGAPGGEQVAAAGSAMDGVRRAETGATDAPRGLVDTARR

SEQ ID NO: 4008 - protein, 389 aa, Taenaris catops
MIRAMRYRSYVYALQPTNHQNLLFEQYAGVCRLIWNVALDQRRNHWRNFQRSTGNSVTYASQVRELTNLRTEFAFMREVPCATQQFVLRQLDRAFKRFFEGSTAIPGFRSKSCSNSFTFDRNIHVKKINKRWGKVKLPKIGWVKFRLTRPIKGKICQATVSKTPLGWQISIGCKFEEDVVDNGLTAGIDRGVAVPIALSDGTSYSLPEQIEKYERAARRAQKVASRRKRGSKRHAKAQQRVRSLKARQARVRKHWAHEATTDITRRYSGVVIEALKTKNMTKSGPHKRGLNRSILNVGWHQIETMLAYKAARLVKVNPAYTSQTCSDCGTVDSQSRKSQASFVCTACGHRDNADTNAAKVILIRGSTPGVEVSRRTAAEARTHQTALAA

SEQ ID NO: 4009 - protein, 367 aa, Actias luna
MKTLKLRIRDKHTDQLSRLSGSVNFVWNYINALSYEHLKRTGKFFSGYDLSEYTKGSGELLGLHSQTIQAINETYAKSRKQFKKAKLNWRTNNPKAKRKSLCWLPFKQSAIKHIATHATGKKGLKSTLQLSLAKGQKLIIDLWDSYNLSLYQINTCELVQDSRNRWYACITVKDYPKPSCGTGSVGIDLGLKDSATASNGDKLQIKQTQAWAKKLGIAQRAKNKQRVKAIHTKIKNTRQDLIHKFTTQLVKDNALIVVGDIKTTQFNSKKGKLAKSVYDAGWFELKRQLTYKCENAGCRFEIVNEKYTTQTCSYCGDMSSSPKGRADLRIREWTCAKCGTRHDRDINASKNILAVGLDRLVEEIPSL

SEQ ID NO: 4010 - protein, 434 aa, Actias luna
MKINKAYKFRLEPNAEQEVVLNNLVGSARFVWNQILALSFDMFAKNEFINATNLVNKIMDIKANPDFAFLKESSNAVSLQQKIRDLASAWSRFFDPKTHARLKENKKKPRKAKFFTLADGTEIQLRPLMPRFKRKSDGYDSIRLVQFDKYCKVQGNRVKLPNGVGLVKFRKSQDTLGTIKNVTISKKSGHWYVSFGTEREVETPRHPAKTAIGIDLGITKFITTSNGEVIQPKNSFKTNQVKLAKLQRQLSRKVLFSQNWKKHNRKIQKLHHHITNVRHDYLHKITTSISKSHAMIACEDLKVANMSRSASGSMDKKGRNVKAKSGLNKSILDQGWSMALDMLEYKQNWLGGILIKVNPRLTSQTCFECKHVAVDNRRTQAKFECVQCGHTANADVNAAKNILAAGHAVLSVEERGSKDLPLTQKTCDLREKVA

SEQ ID NO: 4011 - protein, 303 aa, Actias luna
MYLRFFSLCEAVKWRWENRSGDFFFSIDFLRLSSFTNNPKAKRRSLGWIPFKKTAIKHISTRQSGRKSLKSTLQFSLAKGKKLTIDLWDSYNLSLYSINTCELVQDNSGHWYACVTVKEFPKTACGTGQVGVDLGCKESAVTSNGNVLTTKLTHKYAERLAIAQRAKHKKRVKAIHAKIKNTRLDLIHKFTSKLVKANNLIVIGKIKSTSFTSTKLAKSVYDAGWFEIKRQLDYKCKNAGCHYIEVNEAYTTQTCSCCGSRQDSPRGRAGLGVRVWFCSSCQTVHQRDVNGAKNILAVGLDRL

SEQ ID NO: 4012 - protein, 382 aa, Actias luna
MTKQILKAHKVRLYPNEEQQIFFAKSFGCTRFIWNRMLSDKIDHYNEHKTELKNTPAQYKKEFEWLKEVDSLALANVQQNLRAAYSKFFKGLGFPKFKKKGQRDSYTTNNQKGTVAITDSTVKLPKIGHIIAKFPSKVNGLIKSATISKTPSGKYYVSLLVETIATTLPKTHSNIGIDLGLTDFIVLSDGSKVANPKFLSKLQHKLAREQKILAKRRAVAKADQRKLSDSRNYQKQKVKVAKVYEKITNIRKDFLHKLSFNLIKNHDVIAIEDLNVKGMVKNRKLSKAISDSSWSTFTTMLNYKAEWYGKALIKVDRWYPSSKTCSGCGHLLTKAELPLQVRSWNCPSCLQSNDRDINASINILNEGLKLATIKTVGTTGLA

SEQ ID NO: 4013 - protein, 358 aa, Actias luna
MKTLKLRIKDKHAQQLNKLAGSVNFVWNYVNELSFKHLQRTGKFFSAYDVAAYTKGSGELLNLHSQTLQAITETHTKSRKQFKKTKLKWRTNNPKAKRKSLGWIPFKKTAIKHLATRQTGKKSLKTTIQLSLAKGKKLTIDVWDSYNLALYSINTCELVQDARGNWYACVTVKEFPKLVCGQGKAGIDLGCKDAAVSSDGDKLQTKITHKYAKKLAIAQRAKNKKRVRAIHTKIKNTRKDLTHKFTSKLVKANNLIVVGKIKSKSFTSSKLAKSVYDAGWFEIKRQLTYKCKHAGCHYVEVNEAYTTQTCSCCGSRQDSPKGRKGLGVREWFCSSCKTVHQRDVNGAKNILAVGLDRL

SEQ ID NO: 4014 - protein, 400 aa, Actias luna
MLAMSFEMFANNEFINATNLVNKIMDLKNNPDFEFLKSHSNAVSLQQKVRDLASAWSRFFDPKVHARLKENKKKIRKPKFFKLADGTEIQLRPLMPRFKRKSDGCDSIRLVQFDKYCRIEGNRVKLPNGIGLVKFRKSQDIIGTIKNVTISKKSGHWSVSFGCEREIENPIHPSKSAIGIDLGITRLISTSDGQYIKPKNSFKSNQVKLAKLQRQLSRKVLFSQNWQKQNRKIQKLHHHIANIRHDYLHKITTNISKNHAMIVVEDLKVVNMSKSASGSAVQHGRNVKAKSGLNKSILDQGWGMMVDMIEYKQHWQGGLLIKINPRYTSQTCFECKHIAKENRRSQARFECVKCRYVANADFNAARNILAAGHAVLSAEGGCGKGRPMKQKTCGLREKAT

SEQ ID NO: 4015 - protein, 331 aa, Actias luna
MPKQILKAHKVRLYPNEEQQIFFAKSFGCTRFIWNRMLSDKIDHYNEHKTELKNTPAQYKKEFEWLKEVDSLALANVQQNLRAAYNKFFKQGARFPKFKKKGQHDSYTTNNQKGTVAVTKNTVKLPKIGHIKARFPSRINGLIKSATISHTPSGKYFVSLLVETIVNELPKTHSNIGIDLGLTDFIVLSDGSKVANPKFLSKLQDKLAREQKILAKRRAVAKADQRKLSESRNYQKQKTKVAKVYEKITNTRKDFLHKLSFNLIKNHDVIAIEDLNVKGMVKNHKLAKAISDSSWSSFTTMLAYKADWYGKTLVKIDRWFPSSKTCSNCNQ

SEQ ID NO: 4016 - protein, 319 aa, Actias luna
MAEVDSLALANVQQNLRAAYSKFFKQGAGFPKFKKKGIKDSYTTNNQKGSVAVTKNTVKLPKIGHIKVKIHQSVNGLIKSATISRTPSGKYYVSLLIETIVNELPKTHSNIGIDLGLTDFIVLSDGSKVANPKFLSKLQAKLAREQKILAKRRAAAKADQRKLSESRNYQKQRIKVAKVYEQITNSRKDFLHKLSFNLIKNHDVIAIEDLNIKGMVKNRKLAKAISDSSWSAFTTMLTYKADWYGKALVKIDRWYPSSKTCSNCDHLLNKAELPLSVRTWDCPSCLQKNDRDINASINILNQGLLLAKQSKTVGATGLA

SEQ ID NO: 4017 - protein, 282 aa, Actias luna
MTKSYDTRCLLLVVVASSSPTSLGHIVTSHQMDHINVLDEVLRMLLEIINSCLSHQLVNNLNLVYALLHKRHVFQHHQNHHITQNIDMVKLAKLQRQLSRKVMFSQNWKKQNSKIQKLHHHIANIRHDYLHKITTTISKNHAMIACEDLKVANMSKSASGSMEKKGKNVKAKSGLNKSILDQGWGMMIDMLEYKQQWRGGLLVKVNPRYTSQTCSECQHIAKENRQSQSKFECVKCMYVANADVNAARNILAAGHAVLSAEGRCGKGRPMKQKTCNPREKVA

SEQ ID NO: 4018 - protein, 477 aa, Actias luna
MVKKIVLQTDFGLEDGAVSAMYALAFSVDSSLGIYNLTHAIPQYNIWEASYRLYQTVNYWPQETVFVSVVDPGVGTERLSVVARTADNHYIVTPNNGTLTHLQESIGIVELRQIDETVNRLPNSGESYTFHGRDVYVYTAARLAAGVISFDEVGPLCNLNQLVVVPQQQSELVQDFICLNMDMFVSLFMLTRLIGGNRVITLGTAIEQHFLVTQNWGFTSVLLSHVAFSIPIVVLMVLPKLQEMNDTMIKAARDLGANTWQVLTKVILPSITPGLTNFIVLSDSTKVANPRFLSKLKDKLAREQKILAKRREVAKAQQRKLSDSRNYQKQKAKVAKIYEKITNQRLDFLHKLSFNIIKNHDVIAIEDLNIKGMVKNRKLAKAINDSSWSVFTIMLAYKAEWYDKALVRIDQWYPSSKTCSGCDYVLGKDDLKLSDRLWDCPRCLQTHDRDINASINILNQGLILVKQSKTVGAIGLA

SEQ ID NO: 4019 - protein, 747 aa, Ara chloropterus
MSAAIGRRKRRKLKSEINVVPYIDVIRHSAKYSLMGTGQFQCKVQALRKKDSRKQSCFPERQTLKTFPATVHALLFFTLVIRFSYFMAWPFIAVIMTQNYHMSPIAIGLAMTSSALISVVLGMYGGQISDRLGRRVILLLGCGFSAVGYIILAQATGMALFICGLMIIGVCFAWVDPPVRALMSDLLGDRRRRALALQMRYYLINVAAVFGPLVGIVFGLTSQKGTFLITGLSYLPFFVYVLLFVPAGKLLDEGQQTGSGPAIKFHQVIGVIARDKIYIAALLCSILCSVVFIHYEAVLPQYLLSLDGNAAIKLITLILVTNACTVLVFQTFIVRFMAQMTLPRRILMGGEEPGPKDAAGSLLHVGSLKAPFLTAVMLVCRKIISETKGFAIYGLSTNRVSAXAALEHGSAEQSAGSSAICWAWSRYFERCRTGERAYPPCFKKKGRCKDSFYLANDKFKLEECTAVLPKIGRVVLREALRWPGKILGASVSREADHWFLSVQVEVLEKAAIRRRTANGITGVDLGVSSAATLSGGEKITAPRPLRGALRRLRIRSRRLSRKLESAKVMIGIRGRVPKGTRLPVSKNRTKGAKALARLHTRVARVRRDFTHKLTARLCRENQAVGIEDLNVKGMLANVRLARAIADVGFFEIRRQLLYKALRFGTRIVLADRWYPSSKLCSTCGTRNGELTLDERTWTCASCGITHDRDVNAAVNLQRIASGALGTQSALPEASPTATSVLLPEYIR

SEQ ID NO: 4020 - protein, 400 aa, Ara chloropterus
MIFEWCGLEGTLQIVWFQLDASKHHKDAKTIGQRPVGEYAAHRADPALPRPSHLSLQRQLNAIKRQQFPWMLEVTKNAPQMAIIHLGKAFENFFAHRARYPQFRKKGAHDRFSMTNDQFRVEERRIRIPKLGWVRMREALRFSGRVVSATVSRRAGQWDVSITVNTLEPPLPPAENQGVVGVDLGVAALATLSTGEVFTGPKALATLLPRLRRLSRSLSRKLKGSSNRSKAKLKLARLHARIANLRRENLHQLTTCITRRFHTVGIEDLNVNGMLGNRPLSRAIADMGFYELRRQLTYKAAWRGGQVVVVDRWYPSSKTCSCCGYRLDHLALGIRQWVCAGCGAHHDRDLNAAINLENMAVSSTVPACGGEGTGPVRMRETKPTPAKQESNGRAASNNKG

SEQ ID NO: 4021 - protein, 481 aa, Stiretrus anchorago
MTSWLIEWKLHPDTQWLKESPSQPLQQSLRDLERGYKNFFQKRAAFPRFKKRGQNGDAFRYPQGVKLDQSNSRISLPKLGWIRYRNSREVVGEVKNVTVSQSCGKWYVSIQTEYEMADPVHNAESMVGLDAGVTKLATLSDGTIYQPVNSFKASQRKLAMLQRQVSRKVKFSSNWHKQKQKIQHLHSHIANIRRDYLHKITSEISKNHAMIVIEDLKISNMSKSAKGTAEQPGRNVRAKSGLNRSILDQGWYEMRRQLEYKQLWRGGQVLAVPPSYTSQRCACCGHTAKENRPSQSKFDCRVCGYTANADINGARNILAAGHAVLACGGMVKSGRPSKQEPTEERKTKKDGKNAGGEYFSTISYYKKLSQLISRLCHLDVMTIREMRMSKHTPGPWKWWTSNSFRRLSGPDGKDGGVLCPTVSKSDGHPDLIVSKANMEPIEAAPDLLEALEGALGWLNNGLAHEHYDKAVAAIAKAKGES

SEQ ID NO: 4022 - protein, 458 aa, Danaus melanippus
MKQRPKYAWLNHVSNNIAKQAVKDACDSYKKWFDGMTGKSRLKAEKPRFKSRKKSKPAFYNDNIKLKVKHKSVLLEKVGWVKISEQLPMNTKYSNPRISFDGKYWYVSVGIDEAQPEQSLTGEILGIDLGIKDLAIVSNGKVYKNINKTGKVKKIEKRLCRLQRKVSRKYELNKEGNRFVKTCNIYKLEKEIRHTHRRLADIRQNHLHQTTTEIVKTKPSKIVVETLNVKGMMKNRHLAKSVAQQKFYEFKRQLQYKCEDYGIEFVEADKFYPSSKLCSECGHKKVDLRLSDRTYHCDKCGYTADRDYNASLNLASYIVTNRVKFKQWEKQNQEESTNNQLVEDVSEGKGYNNVAKRITFLEGTPLTSIRYNSLLGLQRAYEVAKKKGLQIGETKTGYIAVYANPSGMKKLQSLLSNNDIEDFKLQNRPSLVFIDKGSIESLTIKSAMEKLKAGDKIE

SEQ ID NO: 4023 - protein, 402 aa, Danaus melanippus
MKRLQAFKFQLRPDGQQERDMRRFAGACRFVFNRALALQNENHEAGNKYIPYTKMASWLIDWKSSPETAWLKESPSQPLQQSLKDLERGYKNFFQKRAAFPRFKKRGQNDAFRYPQGVKLDQANSRISLPKLGWIRYRNSREVIGEVKNVTVSQSCGKWYVSIQTEYEVADPVHNAESMVGLDAGVTKLATLSDGTVYQPVNSFKSGQRKLATLQRQLSRKVKFSANWHKQKRKIQRQHSHIANIRRDYLHKVTSEISKNHAMIVIEDLKVGNMSKSAKGTAEQHGRNVRAKSGLNRAILDQGWYEMRRQLEYKQLWRGGQVLAIPAAYTSQRCACCGHTAKENRLSQSKFVCQRCGYTANADINGARNILAAGHAVLACGGMVQSGRPSKQEPAEASQASV

SEQ ID NO: 4024 - protein, 356 aa, Psitteuteles goldiei
MAKHAGYARFVFNWGLHLWMSAYEEGLKPNVNSIKKVFTNYVKPQYPWMSELSSKVDQYAFINLGDAFKRFFKGISSYPKFKKKGHHDSFTLDNSGKPFNLSGTRHKLPFVGWVSTFEAQPESWVKKVTITRQAGDWYMSFFVEITPEITPKYRERIGVDLGINNLATCSDGTKFSNPKAYKAATKKLARLQRHLSRKVKGSKNWAKCLLKVQKLHQRVANIRRDTIHKITTFLAKNHSQVVIEDLNVSGMLKNHGLAGSIADASFYEFRRQLGYKAERYGSKLIIADRFYPSSQLCSNCGYRQKMPLVRRTFECQNCDLKIDRDLNASRNLEKSPGSDDYTCGRGAADSPGRSKK

SEQ ID NO: 4025 - protein, 287 aa, Psitteuteles goldiei
MESGLGYLRDDPLALRAFRLMNRAMYDQRNKQELIRNGTLESEQYWRPFQIAFVLMNVQGLGNGSHPERDLADLLWFPTGGGKTEAYLGLIGFTILLRHIRNPQQAGVSVLMRYTLRLLTLQQFERAAGLICALEQPPDGEVTEFAPGDIGRIYRLCHYLDDLLSRAKKAPRPKRGRMRKAAARMRERIRNLVDEVHHKVSLEIVRNYRVVLIPKFQTSQMVTRAKRKIRCKTVRGMMTWSHYRFRQTLMRKARETTWCEVIECDEPWTSKTCGECGHIHRKLKKSM

SEQ ID NO: 4026 - protein, 463 aa, Lorius garrulus
MWSACVTDLTYTRYGHLDADQALAAAKKDASRYYRIPTSQTNEKAFDRDPDYAWRTEVNRRSWVSGMRQADTAWQNWLDSLTGRRAGRRVGYPRFKSKGRCRDSFTLAHDVKRPSIRPDGYRRLTLPKKISVTGSIRLKGNIRHLARRIRRGVARIQSATISRSGNGWSVSILALETLDIPDHPTPRQQAAGAIGVDMGVHHLMACSDATIIDNPRHLQSAKKRLTRAQRALSRSKWRLPNGDLIDAPKRGQRVTPTTGRIKARARLAREHAAVAQHRASTLHAITKQLATSHAVVAVEDLNVAGMTRSARGTIDKPGRNVAAKAGLNRSILDASFAEMRRQLTYKTSWYRSQLLPSGRFVPTSRTCSTCGAEKANLPLSERVFHCENCATVLDRDVNAAKNVLRAALASHDAPGMEESQNARGVRSETSVALRSAKREDPPRGGPPRPSNRVRSSPQMGKRK

SEQ ID NO: 4027 - protein, 392 aa, Ara militaris
MKRAYKYRFYPTPNQAELLAQTFGCVRFVYNSILRWRTEAWYERQEKTDYVQASARLTALKKESEFAWLNDVSCVPLQQTLRHQQTAFSNFFAGRARYPKFKSKRHKQAAELTASAFKYRDGRLYMAKSKAPLDVRWSRPLPSTPSTVTITRDAAGRYFVSCLCEFEPASLPISPKMIGIDVGLKDLFVTDSGFKSGNPRHTAKYAVRLALLQRRLSKKARGSKNRVKARLKVARLHAKIADCRLDALHKATRKLINENQVVCVESLKVKNMIRNPSLAKAKAKAIADAGWGELVRQLQYKGEWAGRSVVAIDPFFPSSKRCSCCGFTMQKMPLDVRKWHCPECGAEHDRDVNAARNIKAAGLAVLAHGEPVNPELHRAAQVRLSEVGILAL

SEQ ID NO: 4028 - protein, 1749 aa, Picochlorum sp.
MVGHISVEATQAAHYHVYRCLEEGIDLGKMDYNNFWNYIFDAIKDLRYGDGLKQDIRTPLYDSLRQYAEEAPLPQAGESLRWDVDGHTAWRRRCLLAAADAKAQNLHIILHHNAYHNLCKIVKVRLAHTFGARYADDFRSLVSAVAVAVWEDVDFRNVKEGYDRLKNLTEEEVQDIQETIVTPIREKFPDQEGRKENAKMMEFVHFVAGEVMEYNRHRSEQSGPGSPPQDIELVNMCVGEKLAVAIERDLRKGSLTKKAFVHHVKHALDIFRQCSGPDVFTTRTDQGLRDGDNGPRVVDRNDRYRGQILCLLSERILYQSQKGGAEFLSQDQVGWIDGISSELRLPSSLADYDMTKNDFADYMERVILPKLRSSFLFVAPRRSNDAEAPWGKRIQVPSVLPLAKKRACHISIPTAAITGLAEGLAQESSDIAKAIHGPRETLREARQRVTSIESRIVDMDKENWLTDEQQKVKQELEDNKKKSKLEFEQTPTGKRHRYKKSDEEKKLCKELTDRKTAILNGSQEYVDAREEVEKAALRYQECCWTALFNIKVRRCQNGHQWLFGGQLSTDGVDVSMQYYRLKTDDEIRADEEEKERIKARAAEKATGSSTGKPRKRKRTSRAGPGTPQSSNVSSRGNLDRAKDLLAASPDNAWVFDPGPDGHVGIKMEQGKMRELCQENKRHGDYDPFETMSLTNHEMQSRAGILKRKALERAWSQARPGIGAWKQEAPTRKVGTARDMLAFCRTTNSHLNTVYGFYSQNCFRRQRFSVYTRTQRMLDSMVERICGTKDREAQSKTVVVFGDASINSGKHGKQRICFRALKDLLRQRCCFIEIGEFRSSQYCCACHAKLEDPPAVGLHKRWKVRRCMNNGCERAFWQRDVNAAINLAKFFLWEINGEEKPTVFQRPRTRAEEDIPDLTKFETKSNRVKGLSFHPKRPWILASLHSGVVQLWDYRMGTLIDRFDEHEGPVRGVDFHPSQPLFVSGGDDYKIKSRTCAAVLTGHNHYVMCAQFHPKEDLVVSASLDQTVRVWDISALRKKNVTPGMGPRDELSMRAAQANAELFGSGDAVVKYVLEGHDRGVNWASFHPSLPLIVSGADDRQVKLWRMNDTKAWEVDTLRGHVNNVSSVLFHPKQDLIISDSEDKSLRVWDMSKRVGVQTFRREHDRFWILAAHPNINLLAAGHDSGMVVFKLERERPAFASHGTTLFYIKDRYIRSYDFATGRDAPLTALRRNPAALYNQGARSMSYNPAENSALVQSDAEGGTWELYPLPKDGSSVRDTGDVKRGDGSSTVFIARNRFASFDKSSNTIVVRDLRGDITKKVASPLPATEGIFYAGTGMLLLRSEEKVALFDVQQRNVAADISAPMVKYVVWSGDMERVALLSKHSIIIADRKLQNTVTIHETIRIKSAAWDDAGVLVYTTLNHIKYCLPSGDSGVVRTLESPVYLTKVHNDMVYCLDREAKPRVVQINSAEYKFKLALSEKKYDVVLGMIRAGKLCGEAIIAFLQEKGYPEVALHFVKDERMRFNLAIECGNIEVALESAQALDTRVMWQRLGTEALRQGNFKIVEYAYQKTKDYERLSFLYAITGDTDKLAKMGKIAEVRGDIASAFHNALYIGDAKERVRILREGGQPSLAYLTACTNGLAEEVAELEAEIGEENLPSLPNPANVKQLRIPVPITKEANWPLLTVSKGFFESLATKDAEKAKGVAQAAAAVADEVDLSAVADAWGDEDDVLAIGDGVEEEGEGREIG

SEQ ID NO: 4029 - protein, 917 aa, Picochlorum sp.
MVGHISVEATQAAHYHVYRCLEEGIDLGKMDYNNFWNYIFDAIKDLRYGDGLKQDIRTPLYDSLRQYAEEAPLPQAGESLRWDVDGHKTWRRHCLKAAADAKAQNLHIILHHNAYHNLCKIVKVRLARTFGARYADDFRSLVSAVAAAVWEDVDFRGVKEGYDRLKNLTEEEVRDIQEAIVNPIREKFPDQEGRKENAKMMEFVHFVAGEVMEYNRHRSEQSGPGSPPQAIELVNMCVGEKLAVAIERDLRKGSLTKKEFVHHVKHALDIFRQCSGPDVFTTRTDQGFRSGDNGQRVVDRNDRYRGQILCLLSERILYQSQKGGAEFLSQDQVGWIDGISSELRLPSSLADYDMTKNDFADYMERVILPKLRSSFLFVAPRRGNDAKAPWGKRIQVPSVLPLAKKRACHISIPNVAITDLAEGLALECSDIAEAIHGPRETLREARQRVKSIESRIVDMDKENWLTDEQQKVKQELDENKKKSKLEFEQTPTGKRHRYKKSDKEKKLCKEVTDRKNALLNGSQEYLDAREEVEKAALRYQECCWTALFNIKVRRCQNGHQWLFGGQLSTDGVDVSMQYYRLKTEDEIRADEEEKERIKARAAEKATGSSTGKPRKRKRTSRAGPGTPQSSNVSSRGNLDRAKDLLAASPDNAWVFDPGPDGHVGIRLEQGKMRELCQENKRHGDYEPFETMSLTNHEMQSRAGILKRKALERAWSQARPGIGAWKQEAPTRKVGTARDMLAFCRTTNSHLNTVYGFYSQNCFRRQRFSVYTRTQRMLDSMVERICGTKDREAQSKTVVVFGDASINSGKHGKQRVCFRALKDLLRQRCCFIEIGEFRSSQYCCACHAKLEDPPAVGLHKRWKVRRCMNNGCERAFWQRDVNAAINLAKFFLLELNGEEKPTVFQRPRTRAEEDIPDV

SEQ ID NO: 4030 - protein, 1768 aa, Picochlorum sp.
MVGHISVEATQAAHYHVYRCLEEGIDLGKMDYNNFWNYIFDAIKDLRYGDGLKQDIRTPLYDSLRQYAEEAPLPQAGESLRWDVDGHTAWRRRCLLAAADAKAQNLHIILHHNAYHNLCKIVKVRLAHTFGARYADDFRSLVSAVAVAVWEDVDFRDVKEGYDRLKNLTEEEVQDIQETIVTPIREKFPDQEGRKENAKMMEFVHFVAGEVMEYNRHRSEQSGPGSPPQDIELVNMCVGEKLAVAIERDLRKGSLTKKAFVHHVKHALDIFRQCSGPDVFTTRTDQGLRDGDNGPRVVDRNDRYRGQILCLLSERILYQSQKGGAEFLSQDQVGWIDGISSELRLPSSLADYDMTKNDFADYMERVILPKLRSSFLFVAPRRSNDAEAPWGKRIQVPSVLPLAKKRACHISIPTAAITGLAEGLAQESSDIAKAIHGPRETLREARQRVTSIESRIVDMDKENWLTDEQQKVKQELEDNKKKSKLEFEQTPTGKRHRYKKSDEEKKLCKELTDRKNALLNGSQEYVDAREEVEKAALRYQECCWTALFNIKVRRCQNGHQWLFGGQLSTDGVDVSMQYYRLKTDDEIRADEEEKERIKARAAEKATGSSTGKPRKRKRTSRAGPGTPQSSNLSSRGNLDRAKDLLAASPDNAWVFDPGPDGHVGIKMEQGKMRELCQENKRHGDYDPFETMSLTNHEMQSRAGILKRKALERAWSQARPGIGAWKQEAPTRKVGTARDMLAFCRMTNSHLNTVYGFYSQNCFRRQRFSVYTRTQRMLDSMVERICGTKDREAQSKTVVVFGDASINSGKHGKQRICFRALKDLLRQRCCFIEIGEFRSSQYCCACHAKLEDPPRAINLAKFFLWEINGDEKPTVFQRPRTRAEEDIPDLTKFETKSNRVKGLSFHPKRPWILASLHSGVVQLWDYRMGTLIDRFDEHEGPVRGVDFHPSQPLFVSGGDDYKIKVWNYKQRRCLFTLLGHLDYIRTVQFHSESPWIVSASDDQTIRVWNWQSRTCAAVLTGHNHYVMCAQFHPKEDLVVSASLDQTVRVWDISALRKKNVTPGMGPRDELSMRAAQANAELFGSGDAVVKYVLEGHDRGVNWASFHPSLPLIVSGADDRQVKLWRMNDTKAWEVDTLRGHVNNVSSVLFHPKQDLIISDSEDKSLRVWDMSKRVGVQTFRREHDRFWILAAHPNINLLAAGHDSGMVVFKLERERPAFASHGTTLFYIKDRYIRSYDFATGRDAPLTALRRNPAALYNQGARSMSYNPAENSALVQSDAEGGTWELYPLPKDGSSVRDTGDVKRGDGSSTVFIARNRFASFDKSSNTIVVRDLRGDITKKVASPLPATEGIFYAGTGMLLLRSEEKVALFDVQQRNVAADISAPMVKYVVWSGDMERVALLSKHSIIIADRKLQNTVTIHETIRIKSAAWDDAGVLVYTTLNHIKYCLPSGDSGVVRTLESPVYLTKVHNDMVYCLDREAKPRVVQINSAEYKFKLALSEKKYDVVLGMIRAGKLCGEAIIAFLQEKGYPEVALHFVKDERMRFNLAIECGNIEVALESAQALDTRVMWQRLGTEALRQGNFKIVEYAYQKTKDYERLSFLYAITGDTDKLAKMGKIAEVRGDIASAFHNALYIGDAKERVRILREGGQPSLAYLTACTNGLAEEVAELEAEIGEENLPSLPNPANVKQLRIPVPITKEANWPLLTVSKGFFESLATKDAEKAKGVAQAAAAVADEVDLSAVADAWGDEDDVLAIGDGVEEEGEGREIG

SEQ ID NO: 4031 - protein, 917 aa, Picochlorum sp.
MVGHISVEATQAAHYHVYRCLEEGIDLGKMDYNNFWNYIFDAIKDLRYGDGLKQDIRTPLYDSLRQYAEEAPLPQAGESLRWDVDGHTAWRRHCLKAAADAKAQNLHIILHHNAYHNLCKIVKVRLARTFGARYADDFRSLVSAVAAAVWEDVDFRGVKEGYDRLKNLTEEEVRDIQETIVNPIREKFPDQEGRKENAKMMEFVHFVAGEVMEYNRHRSEQSGPGSPPQAIELVNICVGEKLAVAIERDLRKGSLTKKEFVHHVKHALDIFRQCSGPDLFTTRTDQGFRSGDNGQRVVDRNDRYRGQILCLLSERILYQSQKGGAEFLSQDQVGWIDGISSELRLPSSLADYDMTKNDFADYMERVILPKLRSSFLFVAPRRGNDAKAPWGKRIQVPSVLPLAKKRACHISIPNVAITGLAEGLALECSDIAEAIHGPQETLREARQRVKSIESRIVDMDKENWLTDEQQKVKQELDENKKKSKLEFEQTPTGKRHRYKKSDKEKKLCKEVTDRKNALLNGSQEYLDAREEVEKAALRYQECCWTALFNIKVRRCQNGHQWLFGGQLSTDGVDVSMQYYRLKTDDEIRADEEEKERIKARAAEKATGSSTGKPRKRKRTSRAGPGTPQSSNVSSRGNLDRAKDLLAASPDNAWVFDPGPDGHVGIRLEQGKMRELCQENKRHGDYDPFETMSLTNHEMQSRAGILKRKALERAWSQARPGIGAWKQEAPTRKVGTARDMLAFCRTTNSHLNTVYGFYSQNCFRRQRFSVYTRTQRMLDSMVERICGTKDREAQSKTVVVFGDASINSGKHGKQRVCFRALKDLLRQRCCFIEIGEFRSSQYCCACHAKLEDPPAVGLHKRWKVRRCMNNGCERAFWQRDVNAAINLAKFFLWELNGEEKPTVFQRPRTRAEEDIPDV

SEQ ID NO: 4032 - protein, 411 aa, Androctonus mauritanicus
MSESEQQSLDGFVDPTATHTETVTRTVKCRLETSRRKTARVREKIDAWQEIAARMAELMPSYRESQWQPRISGRFKLVRQEFPTEGHGINGLKSHDAYQALYKVAEAFRSWKQNGKPGDENPTGRFGNGSYLRLAHSSVDIVENETGFGVKLGLEPYNPEWFSIVAGSYQTQYLKRIVDAEDDLSAGSAEVHLSDDGTPILHLTVSEEIEVYDIGDVETVIGVDIGENVLAAVAVVGVDGTVHSAQIENGSAATGAEFRQKREELSYRRDIAFRNGNLKKIKEARNWREKYTEHVLHTASKSIVEVALDNSPSGIVLEDLTDYRMTAKDPIHDWPYASFQEKVIYKANNEGIPVETVDPAGTSVTCRECGCHDPMNRGRQKTTEFDCIRCGYTVHADINAAINIPLKAIRK

SEQ ID NO: 4033 - protein, 653 aa, Androctonus mauritanicus
MRYHRAALGKAYGSVGTGGGPRIIRQYVKKAIVGDEVSYKRKFKELAIATKMSRQWSKEDIMAAYLNTIYFGRGAYGVAAASKAYFNKPLKKLTVSESALLAGVIRGPSIYDPAVNPDLAVDRWEYVLNGMVSTGALSQSDRAAQKFPKIAKVRSETSTDNDGPNGLIRRQVLAELEELDISEQEVQTAGLKITTSIDPKMQKAVLAASRNKLDGEPDKLRTASVSIDPATGGVKAYYGGEDGQGWDYASAGLQTGSIFKVFALVAALEQDIPLSQQYSSAPYQSPTGLTVENSDGESCGTCNLATALKNWNDSTKGKRKGPKVEFPRFKGKRHTWSCRFTTGSFGLTDSDRRHVKLPRIGTVRPHESTRKLARHIERGTATIRSATVSFRGGRWFVSFSVKISHNDPPTADPDSAVGVDLGIKSLAVLSTGEVVPNPRHLEAAQKELRRLQRQAARRTGPDRRNRQEPSNRWRKIQARINRLHAFIANARRDGLHKLSSRLVREHGAIVLEDLNVKGMMSNRRLARHVAGVGMGEFRRQIEYKAAWSGVHTHVASRWYPSSKTCSDCGAVTAKLRLSERVYQCEHCGSVLDRDLNAARNLGALVERDTSSASCVVRLNEPAGNPRKPTPGGNGYRHGKAHTGQRQRGNALAR

SEQ ID NO: 4034 - protein, 388 aa, Androctonus mauritanicus
MRCTYRLRVSNTARRVLLAEWGRCRWVWNECVAVSQRAYRDGEKVGPAALDKKLTTWRAGHDWLREGGSVPQQQVIRDFGRSKAKALKDIRDRLPQHRRAGMPTFTKKHEAVPTLNDTRRGFSFRDGRLRLAGGIEVRPVWSRELPDVPSSVRVYRDSLGHWYASFVVAAQTEPLPEAGRVLGVDWGVAETATTSDDAYDLPHAHHGKTAQAKLGRYQRMMARRRAPNGKRQSRGYRKAQRQAAKQHRTVARKRQDDARKWAKRVVRDHDQVAVEDFRPKFLGKTTMARKAADAAIGATKTELVAMGRKHAREVRLVDPKYTTRDCGQCLARTKHALPLSERTYTCTACGTSLPRDKNSARVMLVRAGFVPAGVEGIRPDHPLDGQAA

SEQ ID NO: 4035 - protein, 1703 aa, Androctonus mauritanicus
MATAIDVLTFIQQRYTTTGLMQRQKLLYYSQAWHSVWFGRALFSDPILAWKMGPVTPTAWKLDKERRTTPDTDVRLTATEILRKSLLKGSVSAAERPRTLRQLRSVYSPGPGPLESGTGGMGAGAEVATHHNNHHSPYRPASSTSGSASSVNQSSSTGNSENEKRNYAPGVIMTPFDEQEEWAKISEIMASFGTGLVRESVFVSELEKEFQTRLGLTTDTGSPCVTTLVGQWLAKLSLNEYETLFLNYGFDDLDFINGVLDEDDLKDMGINGDQERAAILEAASLLNNGVEKILASNPSSKKVDDWLKSINLEQYSETFRKHLYLDMERVKRVWEVELAATEENSSCLGYTQTHVRVFLHMCGESVDLDSASNAQQTASQSASVRILSDRKDAIIEIPKLPETYWGPGSTKADPKEIRPFKIDVPKSVIDDLNLRLDKSRDLVAPLEGAKWTYGFSSTYLKTVVDYWRNKHDWSKRQALLNKYPQFTTTIQESASLASQHGAGLAGQGDRVLVRFDRRVLDLLDRVVQRLFRPVDAVVQRRRGGQQLVVCVRGDRVGMVLGGLDALREIAVDLSLLLHRLIEVLPKCGELLLALVHGLLHVIQRRLERADRLGVVAGGRLQRLHIGLDCGELLRYRVVQRALPASRPLTGRRPARAGAVRGAAARRCRRIPRVPRPSLLTLLAAGGDGDLVAGDLAAGLVGGHDPVGAVLLVGVPVRTRPGDVVDGPVAPVDRELPGGRVVECQPDRVRINVSLNRAAREGGGLRGGLLRREIHCDGLVPVSGGESNGLLLTGCGGRILVRGGATRVRVQRLAVAVAPVDRPGLRRHLGPVRHAEVDRHGVAAGGRGRHGRRDSVRVPQRFRTAARLWWEQVDDVEPNVLRVARGLEIPLRHVETGVERARQRRRHPLLVVGDVVRAASPQGAGVRFRVHRERDGSVFERDRLGRGAQAPRHEDVAVHGEIAAVGVAGQARFARVRGLRPHFQREPDIAGQVPSDFDAAGAAVIVDDRLPRRIHDREDVGVDLAELQLDRGPLDDRRPRPGDAGGPVGVLGGVVLAVLRLESDLGLDEALRHDLRFRSVDRLSAPVQPGHADNAGADVGRAQRLLGGGSWARRGGVVTRTQRARICNLSQVRDDLDSLGFAASKLWNVARWTAGRVWDACGQIPTDGDLKSYLKGSGRYVDLHSQSSQRVLEELDEAFTGWYGHRNNGNQKANPPGYRKHNDEHPRSTVTFKQKAFKHDAKNGRIRLSKGRNLKDHRSDFVLCEYDVIGPRGTTVENVQQVRAVYEHGVWRLHIVCDVEIEVSEASGNGVAGIDLGICNIAAVSFGDESLLYPGGAFKEDEYYFLKKRAECDESTSREARRLDQRRTDRRTHFFHTLSKDIIEECVGREVGTLVVGDLGGIREDNESGEAVDWGKHGNLDLHGWPFDRLWKMLKYKGEINGIDVVRKSERDTSKTCAVCGHKDNSQRVERGLYVCEECGTVANADCGGAENIRQKAEVPPSPSAERSDRSNGWLAQPAVRLFDRSEGRFAPREQVAQTNREPFVTVFTNDVDGRTAIGQSGRTKLGTGPIQRRFNRQPGSERPDSPIQCPAFGGRQGFIRLLGRISDMGIVKTEGVLGGKPRLEGRRISVLQIKDLVDRGREPTRIAADFDLDLADVHTALSYYYVHSEEMREWREHQAELERTLREREITGPEDIPDENRRR

SEQ ID NO: 4036 - protein, 371 aa, Androctonus mauritanicus
MAKQHKAYKFRLYPTEEQESVLRKTFGCVRFIYNKMLSERKETYDRLKDDKEALKKVKHPTPAKYKKEYSWLKEVDSLALANAQLNLDKAYKAFFKGNAKFPKFKSKRHKQSYTTNVVNGNIELLDRHIKLPKLKIVKMKQHRQIPVEYNMKSCTISMTASGKYYISILTEYEKEIKGKKIQSVVGLDFAMDGLFVDSATGKKANYPRFYRQMLDKLAVEQRKLSRKKKGSSNWNKQRIRVAKIQEKVANQRKNFLHHTSKELVVNYDAIIIEDLDMKGMSKALQFGKSVADNGWGMFTSFLLYKLHEQGKQLVKIDKWFPSTKTCSSCGSVNEIALSERIYHCACGLNLDRDYNAALNIKKEGIRLLAIA

SEQ ID NO: 4037 - protein, 368 aa, Androctonus mauritanicus
MFFMKTRTICCKLLTTPAISSVLKETSERFSGACNYVLEVAIREKTHNAIKLHHLCYTEVRKRFGLSANLAVRSIRRVVSCMTKLKGTRKRPKVFKPKSIDYDARIFSYRQADESVSLTTIKGRIRIPMILGEHQRKQLIGKSPTCATVINKSGIWYIHIVVDFVAEPFDGDGIMGIDLGINNIATTSTGTMIEGKTRQEYKQKRCAIRASLQSKNTNGSKNLLKRLANKESRRIQYENHVISKSIIEEAIRHNCGVIRMERLKHIRSRTKTWNKHRNRMIAGWSFYQLQKFVQYKAEGLGLSVEFIDPSYTSLTCHRCFQLGSRNGERFNCTTCGISHADVNASHVIALGGASVNTPELGVCTPKSP

SEQ ID NO: 4038 - protein, 537 aa, Androctonus mauritanicus
MNSRKILVSHSHRDRRCPIDQLHSLGLRGAGKHLGVPRAGFRDRNHTRVTPLSPAYIAESQKRRAEEVLDVLRRKDGNLTKGASKMAATKNRQLKPQKRILKVMWRHKEYPLGQHIPMSTKIGPNMDIALDGSKIYDYHQIKSLILESYVDQVNQDYFRGAVVTLADKDEKLIDRNLIVDGEPTDFWTYAKEHMPKDSGKRLTIHLLTSIRQRPKFEANECLSSIHSFFFPKRDSTNRQPPPYSGGTCALTVLDYQIGDVPIVLHREIPNDAALKQVTVKREPTGEWFASISVETGDGTPAKPDNPERCVGIDVGILKFAHDTDGFALGSLNLSDERNRLDRERRKLSRKEHGSNNWERQRKVVAQRYADLKRKRRDFLHRVSAYYAREYDLVAVEDLNVRGMLESPSNSRNTASAAWATFRRMLEYKCEREGTHFVAVEPAGTTKECSRCGVATDKPLWVREHSCPSCGFEADRDANAAVNILSRGLADVGVVHPERTPSETATATGTDVSPVPASRVMEQGSPALNERVSASRAG

SEQ ID NO: 4039 - protein, 837 aa, Androctonus mauritanicus
MHFLEEKHDISPAEVHLIGHSLGAHVAGYAGERLQGLGRITGLDPAEPYFQYTDPKVRLDPTDAQFVDVIHTDGGSIIVGGLGMIQDCGHVDFYPNGGKRQPGCNHGVIGSIEKEGDFLYGLVVEQTYKYRAYPTEAVAAEARRHINICREVYNHALGKYDTAPDDDKPNYTNLQNRLPSWKQNWEKWTSVNSKCLQMAVRRIFSSLSVLSSLKAKGYDVGKLKWKPPREYRSIVFNQSGFDVDDNTGRTNHAVLELSKIGPLELAYHRPLPEDATIAEVRLKEEKSGNWYASIVVDHDPDYPDKPAVETIDREDTVGIDLGILKFIHDSDGTAVTPLDETTDRNRIEKRHRSLSRKEYDSSNWENARRKLAEAYERLKHRRKDFREKLAASYTSQYDAVFLEDLNVRGMLEGDSNGRNVASMSWRETISAFERHGEKNGCHVLTVPPEGTTKRCAKCGVETEKPLWVREHSCPACGFETDRDANASYNVQRLGLEELGINYAVDELLGLGEAEETPAETALPVSTVAVDAQCVVETGSHGSPEPCGDSGTLSQHSNTTTTQARDRRSVWLHWTSLLAVSGRGGGIHSFATGHLENIVRRLSPLNSDVSRVMQQTGIKMAIQWAVFMVLSDLVLDEAIYFLHQEEGVGGQNEKKKKKGRRDFRPEDKGVPRDRWVDYNRFTALLRCTAHLQQGCQRHVRHVATFLWPVRSPIERVGPSGTANSIAYEVARSTDLVIATVDRYAVGYHTGMYTCMPTYITSSAADGRLVTLSVCYAGSGSHPGSSNSAKKFEKCGRVLSGGMKEAVPQAAYHCGGVNWMMEDIFSSESELCAEKNELS

SEQ ID NO: 4040 - protein, 310 aa, Androctonus mauritanicus
MTLFDDDTVSLSTTESRVRCPLDLPDADDGYQRQYLDSDEWSVTESTLTARDGEFFLHIGFRRYKNDTERNTAEDGTVLGVDLGIENLAVTSTAYFFSGRELTNDLREYEKVRAGLQQTGTRSAHRTLAQSSGRELRYVRDVLHRASNALIDEALRYDCDVIAFENLTHIRDRTGASWGHKWAFRTLYEQAEYKAEAVGISVKQVGSAYTSKRCSECGFTADENRPSRNDFRCVKCESEANADYNAAKNIGMRYVRRGQQSSRRTGDSQLALKSGTVTPKRGFTTYPDGFEAEFTDKPHPPRARPSGQAK

SEQ ID NO: 4041 - protein, 1182 aa, Androctonus mauritanicus
MRRTRCTPGRGGPLGLRGRGAFVSARSWSAPAPMTTLYISRRGDVCPYSSRLSELQGAKTPPSSARRGAGASGSRYTVRFTYKYRLKPSDALRAELDRHRDIYRQAYNHFLHRLNHIEDTSRYDELGVLPDLKEWWDDLREVHSKVLQKVVQRLYDNLSTLKGLKENGHRVGRLRWKGSGYYHSFTYSQSGFKLDKKSDRDRDELYLSKIGRIPVVAHRDLPTDATVKAVTIKREPTRRWYAVLSVETPDEPPEKPDEPKRCVGIDVGILKFAHDTDGTAVESLDLSAERERLHREQRTLSRKQKGSANYAKQWQKVAECHETIRRKRHDFLHKLSRYYAESYDLVAAEGLNVRGMMEQSRNSRNTAHSAWRTFIEMLAYKAESAGTHLVQVNPRGTTKECSECGVETDKPLWVREHSCPSCGYEDDRDANAAKNILNRALSDIGTGQAKSTPSETATAVDTTVVSASRVVEPGSSTLNGAASAAKFRRRRRHTRWAAWSAEACSPGRSPRRHWCHAACPPRPRSPQGADRRGGPPGTARPPRRSAAPAPPASSPRVRRPHRADGLGIARRIEHGQHLGDGAAGEGGEVHLHVVPLVGVQDPALAEAAGGGLGAVLIARRGLREAAAVIQLEVEGDVGRRPGLGLVELGVDVPAQHVTGGDGAPAQLLEPVEHRYRGLGRLAAVPRHAQRTGREESAAVPAGRRSHGSLVCGDDHARQVIECRPLPGRGMPVGRAPHRAGGGGAGYFRAQVRRTRETPWSTLSRPCPAPRPQGGVPLALAGGGRRRSAGPAGGGGPGARDRRPALHPREPSEHSGGLLHRARGDRLRAVHGLHHGGVPGGDRSDQLLGLRGGAGTVLLRGLRGQRAHQPSGLRGLRGHRDVLRGRRGHRCGYARRTPPPAVRAAPGLIRLAAADLRGGRHERICGVLEQPDVEGGIGPAHGAHRGELHDLLGHRHQRGERGELEGAGQLLLRLGVDGAEGDVRVRLGRRLVGGCVRGEEHRGRRDLLWLAGPAQRDGFDLRRPPVFCHGRRHIRPDEPRADRVRTDAMLRAFTRGHPGQRLDAGLRGRVRALADVPALGRDGPDVDDRAPVTGLPRVPQQLAREQPRALEVDVDGRAEVRQLRAVDQAARRDPGVVDQHVHATVPGDRDLFPVISFQIVPVLEGMFYQILLLPVGCSYIPFI

SEQ ID NO: 4042 - protein, 711 aa, Androctonus mauritanicus
MEYSHRYSAYPTQDVAAELERHIDIHRQAYNYTRYEYTHLPDDSDTIGAAYKHHDRLTEWKREFPLFTEVHSKALQRTVTRFYQNLSNLSKKKEKGYDVGMLKWKPPREYRSITYTQSGFELKNTSGRRATLWLSKIGDIKIRHHRSIPDEPSIKEVTIKKETTGEWFVSFALETDDEHIPEKLAVDSLDTSNSVGIDLGILNYIHTSDGDTVDWLDLDEEYDRLRREQRKLSRKAKRSNNYEKQRLEVAKVKRHIRRMVLDYQHKLTTWLVREYDAVFVEDLDVSGMLQAEGNARNKQDAAWRQFITLLEYKGDLYGTHVKQVEARGTTKECASCSVETTKPIWVREHSCPACGFECSRDGNASLNVLQRGFAELGLGWPESTPVETVLPVDTTVERARSDARTPMTRIEIWSRPQEDIQRPPDETRYYRVGIWEDGEWVEGDLGSEEGDTEEDIIRRHGSGRTTLAVAADDRGDLLDERVENGLIHRKEVHEAIPAPEDQVNTEEVRWLVVTVGDQRRITSQLNSSWNEDVSFLVGALDNEHITIKLKAKRLVSTITLAQYELALGVYDWENTQVIETVLQQKKPSRNSTNIPNISARLEYSSIPTLEPDAPQPSIPENLESRTADFPMIYPVAGPRKRRKDPLNIPMCSNCGKVYKHSRSLWRHRTFECNKSPAFACNYCNYKAHQKHRLTVHIMTQHRVGEKPKKAD

SEQ ID NO: 4043 - protein, 826 aa, Androctonus mauritanicus
MQELFRESADKPTVIWTHDIEQLKRDSIIKIVRGLSNNTPTAKIDMTMLSQTEKSLLRQRTSSVFERSEKPVHVIIFKHTESFYRNSSHILTTISNLTGIKPRPKVIMVIDGNGRYALLKKDMKELLLLAWKKKFLDVTLVYVKPKPKSCPIYLLYQPFEGVFQEKYLSRNSSLFPDKRKDMKGHRFTIADPRNIRQDIVAFEELYKYHKKFFCTLNPGNYIFIKYMFCQVSNCTAVVVGKKPEHEANIIYHAHFFDQKDNQERLYGLNIPPLTRWTGQGCKVTALVPCPYEPRNRNRSSTPLNIISGSISQEESMRACFTQAMQEFGPINILIVDSDFRDESSQYSILDMPVGVWETTCQANVRGTFIAIQQCLQVSKEMMSRIQTDYLAIVVMGDRFGLQEGLVREVNREIRRLSIEARINAVAPWVDVYPGAKESDKNEMWSASNITGADMVWFPRKIADLDQAQKVLMAGSELDADHPVSKYISTCRQLSRSVQGIFGPSDPILGAHIQSICEALDVPHLEARIDFETAYKEFSINLYPTQDHLNKAFRDVMIFLNWTRVAIIYEEDHVRVSQELFEKYHLLRTKKDKKRIVGVDVGIKSAAVFSDGTVIENPKSYEKSLKKLRRLNKELSRRRKFNKTTGEVASQRYEQTRKKLQKQYAKAMNQEVDFAHKLSKRLVDEYEIIGLEDFNIAGMLKNKKLSRRIAHAGFGRLKIFTKYKSEWYNSRVIMIDRFYPSSKTCSECGAVKAKLSLKERVYECDDSNCGLILDRDLNAALNIEWKAAQGCGEALNGQGDESAGLVEGLPSETGSLGTDKSNALVSI

SEQ ID NO: 4044 - protein, 419 aa, Androctonus mauritanicus
MATALTSAYGGDTLTVSDMMKDPTWIPERILEELDGAFLEEALFRNGGTNDGVVAYREAAAPFLNDDVEEVAEFAEIPVSNLNLGKARTLVGVKTALGVRVSREMVRENRLDMVSRQTTALADMLDDHRELYNAALQERRGAYQHPSRTSIRYGDQSAQLRDVRTFDPDRQGRWSFSNQQATLRRLNKAFAAFFRRVKTGQKPGYPRFKGVGRFDTTSDGQHIDNPRHGQRLADELAAAQRHLATFPTRKRARDRTKPHREAARKVGKLHAKLRRQRADYHHKTALTLVRAYDTIACEDLNIAGMIRAPAPKPDPDQPGAFQPNGAAAKAGLNSSILDAGWGQFLGILAGKAESAGRRVIPVDARNTSRTCPDCEHVDGGNRATQAEFTCQRCGYAANADVVGSLNIASRAGLVLRAAA

SEQ ID NO: 4045 - protein, 866 aa, Androctonus mauritanicus
TGTSNNQRVPDLVNMVGAITHLIQAATASGESSILHEVGFYHDETLHFSVNQFWPLLFDGITQFVQLMRHLRYMEENEQADLWFDIAPNQYCPSLSRRAVHHVAQSLRVRQVEFGVRARTERAVVEEIGAGTQLQREEARNLAAFHFCMEAAPYVSFLRPANANLVAILFCIEPEPVEYHILLKKDGPLISITDIPISKAKVHHFNSLSVSIFTIIAIANEYIRRTVITRALPTEEAAALIDATIAEYKESCQIATDMAWPDMKSKSDVQPLAYDTIREETNLTSQHAILATHQAAEAITGCHEQDAKGRKTSKPTFTADTVTYDSRTMTLFDDGTISLSTVENRVRIALSLPEDEDGYQHQFIDSDEWELTESTLSKRDGSYYIHLGFRRFATDAEREAKKDHANDTTTEDGTVLGVDLGVANLAVTSTCLFISGDELTHWQREYEQRRTSMQQTGTRWAPIDMQRVGRKEESRFTIILHEAANAIVDEADANDCTHIAFERLDGIRDRLPWATWQHRWAFRKVYEFVSYKAVARGISVRQVNPKNTSRQCSRTDCGFTHPDNRPKTNGQDEFGCLKCGYEVHADYNAAKNIAVKYARRLHRLHKSSDGGAPVDVPLNSGLLTVEGPADVSVGGETPQFFLPHHLLTPEKELNYLRKVSELILIALFSRSLVCHTSNKNLLIEILACKVLLPSVNLVTDPDYINQKILDYMEQIEQSHNLHQHSTAHAESYQDFIHLIRNSEDVDYLKHIRYSIMTEIMQATTVQNLKKAKDLDKEKEQSSTKKLKRYNPALLCEIPMRSPFEGFGLPGFPRRVGKFRNRKENSTVRKSLGEFIRKENVFAVFGNWGTGILARILGGRGRIKKHG

SEQ ID NO: 4046 - protein, 361 aa, Androctonus mauritanicus
MTELEFLSFMSYKEEILENYVPKLRKTYNAREIDDEHPLRFTNQAAKFDHSPEREHEYTWWVPRPGRGTNFWIPLRINPEQGELWSDLLDGEASAGEIRLQQHRTSWELHVTVEFSVPEPETDEERTPVGFDIGETALITGCALKRDLPVQPRMWSGKRAKHLRKEMFTTLRRLQERGASERRVDERFGHYQNALTDIVEKASREAVEYAQRFDSPVIVMEDLGFIRERLDYGKWMNRRLHAWAFARLQGRIEDKATEAGIPVEYVNPAYTSQECHECGHIGYRREQAELVCRNPKCRVTEFQADISAAASIAQRLDPWGERCLWKSDTDDSPRDGSGCDTATRHPEQSAPTQMTLGAWSS

SEQ ID NO: 4047 - protein, 1097 aa, Androctonus mauritanicus
MKRSNTFDVAPRSDADAEILRRVLDASASLWNELTYERRQQFFDGDSVWNTEDYHKRYVGVLGSASAQQTIRKNDRAWKGFFDSDEPDKGLPGYWGNEEDGRDLRWYGRNDQYKIQWGERSRLDILVGSDLKDEYGLGAQERLRLEIRGKPKWSGKQGRLELYHDESSGRFRAIQPVRDCSPQASPLADETAALDIGANNLVACTTTTGKQYLYEGRGLFGRFAETTERIAKYQSLLDEDRYSSNRIRRLYRKRTKRRNHAQDALVRDLVERLHEQGVSEVYVGALTDVLETSWSVTANQKTHNFWAFQQFVNRLACVCEEFGIVLEADGEEWTSQECPHCGKRDETVRHKDTLTCPCGFDGHADLTASRTFLHRQLDDSQVGLMAQPVRLKWNDHKWSESPYSCSNEVRGNPSDLPDLDGINQWDNIVKNSPSKRQEIDLNIDDEGDVSTLRVDSPQHHWKIVVGDLQGGKYDGYYGDGSDLNPETDPVYSPESITSSETHKSLQKLARKYSSITVTPQTLIPSLRENSTVKCDYPVLSRKRCSSAENPHTICLYDIKTDPCELNDLSSDYPDVVSTLLNRINEHKKTLVPSLPSVRAVPTQPRGPQPAYGLEYRRRLDLAAVQREPLRRRPRHRRDIRPCGLVRERVRALLVLRDDPLSLLGHAERLGPEADVLLPRHADGLGEDGRGDLRELVVEGLVAQLRAEDEVGLEGGDLLQVGLDLGAHHLGLLDLVGQVLVPVIGPRLDDADRRDPQSEDRVGLALAEGDDLLGLARDVRRAHGVLDGGAPGGCLPVGGAGRAGGAARGEGEGERGGNGDRSEXXXXPVRPRPAVATLVGSHGPSVVPRACRTATEFSESEEAPGSEDPQAARDRDSAVAIATAPRRGVIRGAPGWGRGAGHGETSVLGKANNTRSCLTRRAGAGRRSTRAPTDWLAGPMDARLPAPLRPGDTIAVTAPSSGVPQALWPRLDAAIAHLRRRGLEVLEAQAHGVQPLALEAQPPGERGVGAVGRVADARVLERAHVDADLVGAPGLEVHLEQAGEPVRLEGLVVRDAVLAAAHHRELVVDDLVGLFGDRRCIAFTDLARINGFVGHYRW

SEQ ID NO: 4048 - protein, 756 aa, Androctonus mauritanicus
MGIAGDIALILVAAFLGGLIAQRLGLPLILGLAALAGIAAAVFLWPRVRPEGVTIRNPYRRYGVSCAYAYPLTPTDAHHERLSWTVDTCRQVYNHFLHRLNQHDETPAMSALRAELPDLKQWWTDLQDVYSRTLQVVVERLYDNLKGLSRLKEEGYRVGSLNWKAPREFRSFTYSQRGFKLDKKSGRTVLHLSKIGDIPINLHREIPNGTRLKQVTVKQEPTGNWFATFGVETDADAPPKPDEPERCVGIDVGILKFTHDTDGHAVGSLDLSAEEERLEHEQRVLSRKEHGSNNYRKQQRKVARRHADIERKRRDFLHKLSAWYAKTYDFVAVENLDAKGLMELPSNSHNRASAAWGTFRRMLEYKCEREGTHFAAVDPKGTTKECSRCGVETSKPLWVREHSCPACGYTADRDAITAENVLQRGFSAIGMGCAESTPSETATAVETRDGQPSEKDQQCVEDQSDDDDEDGSGQRHLEGVGTPEPGEAVEDERAEARAEDVRDDRGDADHDRPEARVDLARRRGATQWDLRGQGEGELLVDEGAPVSRVAVHDQVAGVLLECLVRVGFDRFLHGGFQGRLHVIRQALGRVYPAPATEFDLLADRLFRRGDVGGIGVPLVVQHREDAHGVALRERLAEPGDRGDRLARSGRSDRGGAAVVRNGRELGAGCLRESEGRRLPDGARARVRDRHCAGLRLRDEILERLDAAVSRDGDHSGRQHDLTPQVVVLRQDVGALRGVEHRDLDGCEPDDVAVRVL

SEQ ID NO: 4049 - protein, 315 aa, Androctonus mauritanicus
MQSGAGTGVTSGGGGAGGGGGSHGGGSAGGTGDDEAPKDPGANIHHQSYTEQDFEGTFYFFVFCHELIYGINKGKEILGNRGFTIRELKVELTHSVLCVPPVPLDAAQRELRRLQRQAARRWIPGLKPNQQSRRWHQIQDRLRRLHTYVANARQDGLHKLSTRLTSEFDTVVVEDLQVAGMLRNRTLARAIADVGMSELRRQISYKTSWHGRRLVTADRWFPSSKTCSGCAAVKAKLRLSERTFHCGECNLVLDRDLNAARNLANLVEATGGTSSQSCGATENEPAGNPRQTSLAGSGYRHGKTPPHHRAGANAA

SEQ ID NO: 4050 - protein, 944 aa, Androctonus mauritanicus
MSEEIQWKLCSATRHLRWLSCGPEKGRFSKKMKKKITQRPARAGHRGTPGGVHGRDGGERVGVQHRVQLRPVADVHRQEPAGRLLPEGGTCRDCGCRDNGDWHRILRCRLLQPDELPAAAVLVLQRPAVRHLHPRHGLETDDADGRLGRPGAGRPAAERQYPRSGAEKTRRRPGHSFHHWHADRALRLDPAGNGNVLHQRGGPGESRGCKPQPVVRDRTDCCRLGLPAVGEVAANQSSGGADPAVGVSSSSTPGMMSGGGPKASRAETITDRPIIPEAGSASSSTVTAAMLPRWAAIRASAPTASRGTPVSGSTKSAARPSNWLALAAHCFWPLAWPNAKKGQGGVVLQGALVAVLGTVGEAHPSQPSGTLIPLHLPHRIGRLLGELQGHRLVQQQRGFSQGFDGQAVPAGDHLFVADRHEPRAAQRPHCLAQFLQDAQFARLGHPQQREAEVLRIFGHRREAQQPLGQAMNQRVGDQRHLLARRGEGRSGGRRGEQFLVEEIDDAFGAAPGQSGQRLRALGHVPFGGAGEFGGQHAGACRQRQQPGIVVEHLLEMRDRPVLVDAVAGETALNVILQAAEEHRFEVGGRGGEGLYGAIRRGDYCTPQCFQGPHELADDHPVRFVNRAAKFDHSPNRDAEFVWNIPQPGHGPNFWIPLHVNPDQRDVWFDLLDGDAEAGELRLLEDPDSWTLHVTVEHEVPEPNNSDEPTYVGFDIGESKLLAGCACRDDGTPVRPMFVDGGRTRHLRKEMHTTLQRLQERDAAEWRTDERFEHYQNALTDIVEKASRKAVEYAQSFESPIIALEDLSYIRERLDYGAYMNRRLHSWAFARLQDRIEDKAREAGIAVEFVAPAYTSKTCHACGHIGYRRKQAEFRCTNADCWVSEYQADLNAAANIAGRVDPWGESLPLKPAGDDSPRDGSAVDSTTAHRERSAKPAQMTLAEWG

SEQ ID NO: 4051 - protein, 303 aa, Androctonus mauritanicus
MSRFAHLSATKFCETYKSNEITIINNQNWNTVDKNGRWYIAFTSNQGKKALPVVETKDVQSYFPFLTTKTREFRGTIELLRKGRRWYVAIPIQVSSDLDLENSHPSVTKPLMDYTSIGVDLGLRHLVVLSEPTSGKRQFFSGKEVGYKRRHFRSLRRSLGKKKAQRAMERVGQKESRWMKDYNRKLAQDIVTFAQQFEKPMIKLEQLDNIRKTCRSMKRADKTIHSWAFYQLKQCIKDRAATFNIPVVDIDPFQTSQTCFACKHAERSNRKREVFLCKKCGHKAHADLNASQNIATSTNLAAS

SEQ ID NO: 4052 - protein, 312 aa, Pionus senilis
MVGPSTAHRPQGVPLSSGVARSTPTQTYTLGLRRVEDKPIALLFLISHEEKFKPFLLGTNVDKFPFHLLENEVSQWEGPSQADSTSLEQEKYLQAVINSMPHYADASGRNTLSGFTSAHMSSSGPKAHKALLGRLRRTSRSLSRKCKGSSNRRKAKAKLARLHSRIAAIRRDATHKATSMLAKTYRRIAIEDLNVRGMARNRHLARSIMDGGFFEFRRQLEYKARFYGATVVVANRWFPSSKTCSCCGSVKTGLALSQRTYTCDTCGPHLPSSLLASLCDRVRQPEEPVRRDITQLHCFNQAMVIECKLRIG

SEQ ID NO: 4053 - protein, 512 aa, Pionus senilis
MEVEQGVGQQNLQHPIQHKLFSDSGFRALETCHNQDFCLPDIVLANATRRSDAIAIARVICILGVVYVHAWTGRNGQDLELLRGSPQEGLRWVLMEIFGRSAVPLLGLISGWLVGGSARTRNWFDHVGRKARTILLPMLFWNAVAILLVSGAAWLLGLSAPVPQSGGWIAEELFIINRNPDINVQMPFLRDLFLCMVAAPLLVRLPNWMLMAVALAAPFIGYPVFLAKLLCFALFACAFNLLIGFTGLLSFGHAAFFGMAGYFAGNALKNWGLPFELGLLVGVVAGALIGLVMGALAIRRQGIYFSMITLALATKTTPSNRWIRANNQVNKYRAKLANIRRDLAAKAAHGLAKNYETVVIEDLNVQAMMTRGGAHKRGLNRAIAQASFADVRRRITYKTRWNGGRTVIADRWFPSSKTCSECGEVKSKLSLSEREYICHRCGVVVDRDLNAATNLAKLAAPKSGVDFHGTGRLPGMGRGGAGKTNSSSGELAPAGEASMARKDLSGRKAGTR

SEQ ID NO: 4054 - protein, 300 aa, Rhinocypha anisoptera
MDYDRDVVEGLVCFNDRYGRYQIDYILVRQRFSNSVFNSRSYPGADADSDHNLVMMKCLVRFKRIARGRKLKKWNLEASTGAKKKEYQETVDSFLRDCSQIGTTEQRWKIFKDGITRAAGKVIERVNQNRIKKPWVTEEMIRKMAERRKWKNTNTEDGRKGSKNRIKAKLAVARAHEKIANSRNDYQHKLSLRLTSENQAIVAETLRINNMLKNKRLSKHIADSSWHSFITKLEYKANNKGKHLIKLDQWYASTKTCSHCETKNEMLTLKDRIWTCPNCKAQHDRDINAAINIKREGAKN

SEQ ID NO: 4055 - protein, 270 aa, Chrysaora chesapeakei
MKRPLRIRWSRRPPSEPSSVTVSRDAAGRYFVSLLCEVDPEPLPQLEKAVGIDLGLTDLVVTSDGFKSGNPRYLERDLKKLRRAQRRLSRRQRESNRYAKQRRRVALIHARIRDKRQDYLHKLSTRLIRENQTICLESLNVQGMLKNGRLARHISGAAWSELVRQLEDKAQLYGREVVRIDPWYPSSKTCSSCGEKRDADDGHSFISEFQGSKSMTPVIGQRAPDGSKQGRDSPTSSKPAKLSFLGSEHMNTYDNESDDSADPGPIGRTA

SEQ ID NO: 4056 - protein, 250 aa, Papilio bianor
MAQRSGYFGFPKFKKKGIKDSYTTNNQKGTIAVTCRSIKLPKIGYIKAKIDREINGLIKSATVSRASSGKYFVSVLFETITQPLRKTESNVGIDLGITDFIVQSDETRVVNPKFLVKYEKKLAREQKILARRRDAAKAANRKLSESRNYQKQRLKVAMVHEKIANQRKDFLHKTSFNLIKNHDVIVIEDLNVKGMVKNRRLAKAISDSSWSEFATMLTYKADWYGKQLVKIDRWFPSSKTCSGCDHVLAG

SEQ ID NO: 4057 - protein, 474 aa, Papilio bianor
MPRTRSSSRSFRPHIASSRTSEQSERDPGLITTAVSSRAGLAAAARNAGIGGYGSRPSPGRLVGGLSQTSWRARCRRALRWCEGVNHGRSFPERSRITVTLSATGKYYASILVDDGLEAPQPIHSVEKVVGIDLGIAHFAIESRGKKKTNPRFLKRAARNLRRKQRQLSRKKKGSANRAKARLIVAKAHEKVTNARSDFQHKYSRTLVDENQAVIVETLKSANMMKNRKLAKHIADASWHSFVLKLEYKAKEQGKHVIKLDQWYASSKICNDCGFKVKDMPLSISTKEGPLEYVEEYVYLGQIISFKDQTAKETNSRIAAGWKKYWALRYIMKNKDFSISIKRKVFNTCILPCLTYGCETWALTASHRARIASCQRAMERSIIGIRRNDRVRNIDIRDRTRVTDILQRIDQLKWKWSGHMMRTKDERWSKEVTNWFPRDSKRSKGKQHYRWEDELKRTAGPFWRRDLVRHNTKY

SEQ ID NO: 4058 - protein, 629 aa, Magicicada septendecula
MNETDDDGELANYVVKHGLRRFFCPLLDPTTRDSILYKIRDDCKVVSRIMIKASWLISTYYTHYFTKRPLEAKNSFKKLDVLNLIYFLKGNARKKKSFYDPDGIIESFCETCTIENGSYRSFLLLEACKKYETEFCTNVTTYMFRRVKKYDYDLRETSVRSNPFAYVPFLFEMQKKRIESNERMFTIFPVYKQNVKHVTLRWDVKRKTMGLYELLASLRVPDKPSALEIREDPQKYWSRYFALPKNFGYSIATDGVSVSKSVVRVVQKKKKQKPEEDDISVNGNDFERIIAVDPGAKTPIVTCTKNKEDRYEYKILRKQRVDHLCKRHVRRRKMEKFTGVTERMIRDDPNNKRELSFKNPETRLEFLRFKLTHFEEKQTRYERSNVVRLGLDKYVRRQKAEHVIVRKMFLNDTKKERKPVLLLYGRGCKFMNVSSFKGHGKFFHDAILKTIRTYYRKELVVRLVDESFTTKTCSNCSTREGFVVSTGGHRYAFCSKCRKGIHRDKNAAKNIFFCVRKKNVMTHTECLICGMSNTFQVSQGNTGSFVEPKEILSKLNLIFNRDAHGTQEDAHEFLLFLKKHFVETNSDRSSFVDRSRNIAVRSVFVSLLSWLRSERVTGLIPNYIVSDFN

SEQ ID NO: 4059 - protein, 887 aa, Magicicada septendecula
MFQRVKKYFRGEYVNEDDPVAELFKEYDLQDTSVRSNPFAYVPFLFEMQKKRIDRKQPMLTVFPVYKQAVKHVTYTTMGLYELLASLHLPDKPSSTEIRDDPQKYWSRYFALSKNFGYSLASDGVSVSKSLVRRVQKRKKQKIEETNNTVINYDDYEKVIAVDPGAKTPIVTCTKKGKDTYEYRTLRKQHVDHLCRKYVRRRKLEKFIGGIEKSICTDPENKRELSFKNPETHAEFLRFKLKYFEDKQKRYECSNVVRLGLDKYVRRQKAEHTIVKKMFLYDREKTNEDRKPVLLLYGRGCQFMNVASFRGHGKFFHDSILTTIRMYYKRDLVARLADESFTTKTCSNCFTREGFVVSTGGHRYVFCSKCRKGVHRDKNAAKNILLKHTLIGLHSSTDQGMSPMDYLHTDDLNAIQTNERDKSVTAGKLLNLPMNSDSFNFLAESVRRPKIAKNIYEVRNIIKLRRKLKQISKAKTFVGFHDDRLKNSKTLEPLEKQKNKETCPSPVTDSNILKHTVHKLKGGGTECPQNKNHSKKCGTNTVLDSDHSSVHTNSMYAKNKNGLCKNVQKTIINEFNDYLGSSPSFCVTEKNCVQYSQETETKNINNMNESFNFIKKLPIQSNVIDSVHDVCVAVNRPTVTFETCTTIESVPYDTPASVARVHCKSVQGKKSPSRQRKHMPTVKTSPVRKHVKKPKSIQKGQYNITACADVELTHNVQNVTQTPASTWNSNNPDSPLLDESLHTHLLKVCKPLHTYMRNVHKKPTRTYTRRKVNKVNTNDIINSSVTNDNALKTCVFLVSESLNSIDANCFRKLRKNLQIQFDFSTSKRLYKMITKLKIDCERFEWNLSMQTLSRCALMKTSKLPNFIHSPACDKDLKESFAKSFGKQ

SEQ ID NO: 4060 - protein, 801 aa, Ostreococcus mediterraneus
MRRRWRRMQQLQSQIAQRNWSRERHKRGPKYRRTRKQYARTTRRMKATLKTRHLEFXQWMRWVHRSVAKTVAARYDAIACAPLDLKHIFARQLNDTVVQRVIKRRSRRVTHALSLRRCTEALKYACAQAGQIVVIERAIESGTSKTCGNCGWENDALGHAKQFVCHMCDITIGRDWNGARNNALQVLADGGFGMRRDATSGTSGVETTGDDGEWLPAQHEDFTDDAVRDAVEESDVDDEIDSENVSNRLARWRNVKVGQELGARRAALADALRQAIQSVAPTKIHPHQRAAAMLLXERFCSGSPGTLFVMDCGLGKTHTMLLVAGALMTCKVRVVLASENLLASECKRVFSELWPGIDPMELNVIVSGHHAIHKTNAAEAFAQREREDAIFILDEASRYSDESGAMYEAIGESVASGYQPFRMLVTATPFTSNFTKLSNLLSLTGIVGDDERDEFKEQLMCAARTFRNAIAQLFQDHRVGVSEGQVSYSRFLRELTKLAAGTECSVEFLFNGDSGRAHSQPRQSKKSKKSKKNKKRATRTPGGGLQFKTLHAQNDAERAVLAGIATRHATPTMTPEVVAQNAAQAARIKLGIERAQSALDRGETWLPSTSRGFYFFYPKNTSFDAPVRRMMITASSLSGTTFFPKRPVQQNAFMRTGVEFEATALKHIQKKYGFDMVNGVDKWTRALPSDPTVLAATLDGLTTQGIIVEVKFVHNFMDVLTPAGATKKYNLYWPQVQAQLHVFELSLAMLVFYSIDADTDDMFSCEYWIHRDDAWLDRMMPKFDAALDAQRKRHNFDPSSL

SEQ ID NO: 4061 - protein, 739 aa, Ostreococcus mediterraneus
MPDGSVAVHGVAGPSSRYGARQIVDARAVAADEERGHVHDAVVDAHAPADDAGAAPEGPEGAVACPVVHDDFAPSAPVIAAPQPVRIRGRGHERRLQIAALNHGLKSTTQFWEGERLKVRLYNKIPMPRCAARGETRVGNWTAPVYPLDEERSAVYERDEDTTIQMFEALERIADGPEERGDKLHAFIQRKRPLHGQLKTYRCRAYPRAKQAKILKKFCQVQTFDAYNAAIDVIKEKPSCSLTWVRNRVKAALNRDKRDVPCHVMEAGVIEGHNAYLSNERKRLKALHERNERFRYELKHRSPKTTPVVRCTFGATRSGVKHVDRDDASSRTVRLDFARGAHRTSAFRELGVVKVREGALGDLEDKFNFRVTNSKTHKIYAQKENIGFEYDSRRRRWYLVVLYDAPAPPQKKTPAECVDMAVFDLGVRTPATIFSPITCDVFEPYPRELREHMRRRWRRMQQLQSQIAQRNWSRERHKRGPKYRRTRKQYARTTRRMKATLQTRHLEFAQWMRWVHRSVAKTVATRYDAIACAPLDLKHIFARQLNDTAAQRVIKRRSRRVTHALSLRRCTEALKYACAQAGKIVVIERAIESGTSKTCGNCGWENDALGHAREFVCHMCDITIGRDWNGRCLLQFAGRDSGKPAGLVDGLFCYFQNEQWTLQLGETYLPKSSYVQVRLYIKKKANFRVWSILKLVYHVSSKIAVNDRRDQRADCPTNEESDVNRVIVCFPSKCWVYIR

SEQ ID NO: 4062 - protein, 289 aa, Cyclina sinensis
MYVRTLTDKDKCRGPRSRHIVIMKKNFGAPIRINKSVDRIPTFDHDIRIIKRPNGKFVMQIPCDPIWTRRNASSDNIEKHMCGIDPGGRTFATVYDPIAKTAYQVGTEEDKRFNLRPIHDKIDETHWHLTNAQKRNQPRVAEERQRQLKKLHLKLKTFVNHIHTTLCSHLVKHYEMVSLGKIKISSIVKKEIGKKTIARRAKRDLLCWQHYQFRERLLNRSVGTDCEVIVQDEAYTSKTCGYCGVRNDKLGASETFYCDSCQYSTHRDINGARNILLKSLRMFPFASAV

SEQ ID NO: 4063 - protein, 480 aa, Cyclina sinensis
MKRKRPDISLWDACHVHEHGTMWRWWKSIRRKDFRDRDNVRSDCIDDVNVIKAMSGVSKEPKIENKEKKFLTTFSVGLKPTPHQRRVLNLMLKVTNYTYNWCLYLVDEMNMQSNQFELQKTVCKTNICDIDPAYRLPNDDWFFDNKMTAIKTTACRTFCSAYNTAVKRNSKLKTKREVNDCLVQGSIGIQKQFVRTLTDKDKCRVPRSRHIVIMKKNFGAPLRVNKSIDRIPPFNHDIRIIKRPNGKFVMQIPCDPIWTRRNATNDHIEKRMCGIDPGGRTFATVYDPIAKTAYQVGTEEDKMFNLRPIHDKIDETHWHLTNAQKRNQPRVAEERQRQLKKLHLKLKTFVNHIHTTLCSHLVKHYELVSLGKIKISGIVKKEIGKKTIAHRAKRDLLCWQHYQFRERLLNRSIRTDCEVIVQDEAYTSKTCGRCGVINKNLGASETFSCDSCDYVTHRDINGARNILLKSLQMFPFASAV

SEQ ID NO: 4064 - protein, 1980 aa, Cyclotella cryptica
MRQSKSIFRHKCSTMSTSSDNSLNPLQVNASVPAVRRCWHVSTKMYTKQRRYLAMILFVSTLSMLSRTTLAFTASPSTMITLFRTKHACTSTHRTSNFGTAASRNWGILTAQSSDQDDAPQQDDGDEEEWDSPPIIDGFDLDDNDSSYLSEHVLNSMTVTQLKQQLRLRGKKVTGNKAELVKRLMDRGVHSRMVDMEGSPLPAEDGVSSRNKAMETNGSTEGKESKRVIEAKAKGADIIDVTEFVEAEDVGKSFRSSHRNAKSEYDDAIDVDTSDKDGSGNDSSSSVSSPEVWGEDARIVEDYEGRSVVVDGLSRTVIEYKGSNDTIVQAYVVGSRDSLAKFLRGGQQQDKSHQDGEAKSSATKYSSIEEEVYAIQRKRELENKRTLPREDEIEGEEDEDDPGTPYKTIERDPGDWGVFTPTGAQLSSSEVQGVLLLSDVYGPFTENTRALADKIAFECQPVVVLAPDMFRGKPWTQNPITGEDGVERNENRKTYEEWRAMHPERRVDVDIRAAASVLRERYDVASIAVWGTCFGGGRALEAASGWYHGGPESYYNDAFSDRPPPPHVDPVACIAWYPTRYDAKKLFGKENEGFRTFENGNDRDVAVMAVFAEHDSLPGATIEDATLLKACLDEDPRVKDAMVKIFPNQNHGFAHNLAHKKEEVIEGSEPYDLDSFTLNDGYDGSCDAEVACLLSTAWMETYTRVFLPTVGSPVRFDEDESWSTVQMSPYSQKEKRDIRKELEEAIANYEGIEIDFNRMSTSSSDFLDDIPEQYKEIEEEREKIKQMLIEKYHMSPDDEEEVFERKLQQAIDDGALNSVMLDAYLDGDAYXSMFKIDPALMFPGYRRICAQASAKVVQTNVENIVCETFFMNATIATFLDCHHLKRSGNVNIIRRLICGCEPTTFTLDAMVAIGGYRFVQRDKYKAPNRRLSDESPLEKFVWRQKKMLREGATNTKHPISETWIKKNMERAFFYQLLTLKYQQYDEVTNQPDTESKKWNIVPLQSDARPNIVINNEILYFIGAYANYFKNKNLGKLRVLLNGLLKLKTVQDAVMKSSGFHEVLWDVMFHRDIKTALKANRTNAIGIVKVFYDQDPGVVHQQNGPTHQHEFQHLVPGGNPIDDTKREVFGYYMKTEGVVAHVNFWVLKSLDAIDNNMVQKIGPKFGKDLHTRQIKGLLERGYPEEPLSLAVKVGKTKEEGKAWRNTNKKKKRLYKKVMMKIDNAQDPGLIDIVHLRNQDGKFEFVIKSTEFRDQAGGNDAKKKTDNWRAKAKLVEVDACHSTNYSKVSTLHGYTNFLKHEHFNLVNEHITQAMNSVQFYGTQGNFGVSRKEMTKQKYTVNRARSTVKKTKFFSKKMDALVNKLIDLDGCGSYPLVFYGGAQICSSMKGIRSGGVPTATMRKLFEDHFDCEVTDEYYTSQICCDCKAQLARNRFKSRDGNAARNILAKGQYFLEHGSMSDKSDSTVSVFSKRMGGDEGALGLTGIHLGVFGNRPVWPLAFHELAMATNVGRLVADRVRRLCSTTSAQISGGFHGYYPVRHIYRKLVRTKPLSNDGIKRMKEIFNDLLHNNDISKFPTKSECKELKNVYGLTSKQILDKFCKMSDAEAASKRRAKAKLVQTKTCVPLIPSGVGYPFENCLIKHTNIVDSMEGNNVKRRSSYGTHNTRKCNCFSLGQQSVVSFQQLFDESQDFCRNARSIVDFSIQTLPDSEISIHVRECTAANCENEGDCGNKYVNRPTHLWKCVIALQFETNRQTIQGLRVRKGYSIPEWAVIGEYTGKVTSKKNRNKDSRYIVELGSMDTVFVRSIKPINENEFVTIHYGSNYHEFFDCCLWEEIVELGSILSDLFLLVGGIAEIKLPRLFDNIEQSLHHSGYKQSHLQLGAGDFIGEIGFFTESPQIHSVLSVTVCKTLTVPHSTYKLLAQDHPGSVAKILQNLLAMVERTSMQAQLPRSLEELRVGSNLFYMSGSYRAISLMIKQMNAL

SEQ ID NO: 4065 - protein, 1184 aa, Cyclotella cryptica
MLKDSAIEDFITNMSMLKQLFEEECIDTSELNQEDIQRIRDKDPFMYHSILQNFRKMKSLSVAPDRDGVDDELGWESHCPADTAAGLPISRTNFWQTAAVDDNLDPTAQASNDQTSTSSEQSISPLRFSSSSQQASSSSSSSSSRHHTVTDGRELHPGLTAERDWSNTVHQFNLRKHLMTPTAKDSREGIENSRRLARNAIKLGIDNETHRKLVAQNPPGGIVQEFDQDLPLPKDGPRVSIGGTSEALPFGDGPGYFPSFPSGTAGFWKDGEGPKAMWEVVACPVADVEAFLENPLRCVFGGDDGSILDFFSIINGNSIQDAMTDAIVPIAVEFIWVFSGLGWIIRVRDTSFLKLMQKASNETNEQFNQRRRLVLNFVLKTTNLVHLVTKQAYEKINLVARRAFIERISLKDIGFNIFGNGSTQCYENICHPDLSRLNIVQLQPAGRWLFENYGSMFKIDPTLMFPGYRRICAQASARFVQTNVENMVHETFFRRMHATIATFLDRQNLKRSGNVYIIRRLICGCDSTTFNSVALDGIGGYRFVQRDEYKAPNRQLSDESPLEKFVWSQKKMLREGASNTQHPISETWIKKNMERAFFYQLFALEYQQYDEVANQPDIESKKWNIVPSQSDARPNIVINNEILYFIGAYAKYFKNKDLGKLRVLLKGSLKLTTLQDAVMKSSGFHEVLWDVMFHRDMKTALKANRDIPDVAIPGDVTFTIDVSQDELPLVIEGTDEIGTVKVFYGDNPGLGHEQNGPTHQHEFRHLVPGGNPIDDTKREVFGYYMRTDGVVAHVNFWVLKSLDAIDNDMVQKIGPTFGKDLHTRRIKGLLDRGYPEEALSLAVKDGETKEERKARRNANKKKKRHHKKLVEKIDKAQGILDNYDGNHFCLGLDPGLIDIVHMRNQDGKFQFVIKSTKFRDQAGGNYAKKKTDEWRSKAKLVEVDVSRSTNFSKVSTLHGYTNHLKHEHLNLVDEPVTQAVSSVRFYGTQGNFGVSRKEMTKQKYTVNRARSTVKKNKFFSKKMNALVQKAVEFDGRGTYPLVFYGGASIRSIMKGIRGGGVPTVVMRKLFEDHFDCEVTDEFNTSQICCDCKARLEMCKNEEADEVSGFHKEIRGVRYCKNCPPRNRFKSRDGNAARNILAKGRYFLEHGDNDPNYEKMNGRMAIKRVKHYPIDPNRPKMQMKT

SEQ ID NO: 4066 - protein, 844 aa, Cyclotella cryptica
MVVRNNDTGCPDNRIICVRDASFLKLTQKASNETNEQFNWRRVLVLNFVLKTTNLVHLVMNQAYKKINLVARRAYAERISLNDLGFNIFGNGSTQCYENICHPDLSRLNIVQLQPAGRWLFENFGSMFKIDPDLMFPGYCRICAQASAKVVQTNVENMVRETFFRRMHATIATFLDRHNLKRSGNVYIIRRLIYGCDSTTFNLVASEGIGGYRFVQRNEYKAPNRQLSDESLLEKFVWSQKKMLREGASNIQHPISETWIKKNMERAFFYQLFTLEYQQYDEVADQPDTESKKWNIVPSQSDARPNIVINNEILYFIGAYAKYFQNKDLGKLRVLSKGSLQLTTLRDAVMKSSGFHEVLWGAMFHKDTKTALKANRDIPDVAIPGDVTFPIDVSQDELPLVIEGTDEIGTREVFEYYMRTDGVVAHVNFWVLKSLDATDDDMVQKIGPKFGKDLHTRQIKGLLDQGYPREPSSLVAKDGETKKERKARRNANKKNKHHHKRWRRKLTRLKMENLSLSSRAQSTEFCDQAGGNHAKKKTDEWRAKAKLVEVDACRSTNCSKVSTLHGYTNFLKHKHFNLVDKPVTQTVSSVRFYGTQGNFGVSRKEMTKQKYIVNRARSTVKKTKFFSKKVNDLVKKAVDFDGRGSYPLVFYGGAQIRSTMKGIRGGGVPTATMQKLFEDHFDCEVTDEFYTSQICCDCKACLARCVNEDRDEESGFRKEIRGFRTEIKEVEYGPDDMPTTIGLYGGNYTIVFHPGINFMDRLADNANLMVHFHAGDSDMSEGEYERRQWSEEDLCPAEEGRFFEPFLSGTGNSRRDHRLIATQAVGQKRKTDAMGCVNDKMSSS

SEQ ID NO: 4067 - protein, 865 aa, Cyclotella cryptica
MVGRNNDTGCPENRMIRVRDTSFLKLMRKASNETNEQFNQRRRLVLNFVLKTTNLVHLVTKQAYEKINLVARRAFIERISLKDIGFNIFGNGSTQCYENICHPDLSRLNIVQLQPAGRWLFENYGSMFKIDPDLMIPGYRRICAQTSARFVQTNVETMVRETFFRRMHATIATFLDRQNLKRSGNVYIIRRLICGCDSTTFNSVALDGIGGYRFVQRDEYKAPNRQLSDESPLEKFVWSQKKMLREGATNTQHPISETWIKKNMERAFFYQLFALEYQQYDEVANQPDIESKKWNIVPSQSDARPNIVINNEILYFIGAYAKYFENKDLGKLRVLSKGSLKLTTLQDAVMKSSGFHEVLWDVMFHRDMKTALKANRGIPDVAIPGDVTFTIDVSQDELPLVIEGTDEIGTVKVFYGDNPGLGHEQNGPTHQHEFRQLLPGGNPIDDTKREVFGYYMRTDGVVAHVNFWVLKSLDDIDNDMVQKIGPKFGKDLHTRRIKGLLDRGYPEEASSLAVKDGETKEERKARRNANKKKKRHHKKLAKKIDKAQGILDSYDGNRFCLGLDPGLIDIVHIRNQDGKFQFVIKSTEFRDQAGGNHAKKKTDEWRSKAKLVEVDVCRSTNCSKVSTLHGYTNHLKHEHLNLVDEPVTQAISSVRFYGTQGNFGVSRKEMTKQKYTVNRARSTVKKNKFFSKKMNALVQKAVEFDGRGTYPLVFYGGASIRSTLKGIRGGGVPTVVMRKLFEDHFDCEVVNEFYTSQICCDCKARLEMCKNEEADEVSGFRKEIRGVRYCKNCPPRNRFKSRDGNAARNILAKGRYFLEHGENDPNYEKMNGRMAIKRVKHYPIDPNRPKMQMKTREGPRRRHPR

SEQ ID NO: 4068 - protein, 1366 aa, Cyclotella cryptica
MANEPQSTQEATQRVVKILGANYKKADLQSIVSTNCTHLSLQDQNMLLELLTEFEELFDGTLGDWNTEPESFKLKEGAKPYHGKAYPVPKSRKETTIKELNRLCELGVVEFQPASEWASPSFITGKQDGTVRFLTDFREVNKRLVRKTFPLPKISTVLQELEEFTYATTLDLNMGYDTIRLDPDSSKIYTLIFPWGKYSYLHLPMGISGSPDIFQAKMSTLMGALEFVRAYLDDLLCITKANLEDHLDKLKMQKKVQAILAISSPKNVKDLRKFLCMVQYYRDLWARRSEVLAPLTSLVGECGHTKVTRAIKTKKHPWYWDTVHQKAFDDVKTSIAKDVVLAYPDYSMEFEIYTDASSKQLGSVITQGNRPVALFSRKLSTTQQKYSVTELELLAIVETLKEFKGMLWGQRLQVYTDHKNLIQDTLGLTSDRVYRWRLLLEEFGPEIVYIKGIHNTVADAISCLDIGPIPSEHKNWMTFTKCWCHYTMQEESAIDTSAYQEEMNLVFANRSEEDVIYLLTPYVTHMGSRVSLPVSRIHKRMQRVHQVISSMLRTAEIDMAPSVETSDIDKFVTNVAWAIRSTYHTVLKASPGAAIFGRDMLFDIPFLADWNKIGEYRQHQTDQNTERENSSRRDWDYKVGDQVLLRKDGILRKASNETNEQFNQRRGLVLNFVLKTINLVHLVTKQAYEKINLDLSRLNIVQLQPAGRWLFENYGSLFKIDPDLMFPGYRRICAQASAKFVQTNLENMVLDTFFCRMHATIAKFLDHHNLKRSGNVYIIRRLICGCDSTTFNSVALDGIGGYRFVQRDEYKAPNRQLSDESPLEKFVWSQKKTLREGASNTQHPISETWIKKNMERAFFYQLFTLEYQQYDEVADQPDIESKKWNIVPSQSDARPNIVINNEILYFIGAYAKYFENKNIGKLRVLSNGSLKLKTVQDSVMKSSGFHEVLWDVMFHRDIKTALKANCNIPDVVIPGDVTFSTDVSQDELPLVIEGTDEVGTVKVFYDQHPGLAHKQNGPTHQHEFRHLVPGGNPINDTKREVFGYYMRTEGVVAHVNYWVLKSLDAIDNDMVQKIGPKFRKDLHTRRIKGLLDRGYPRESLSLVAKDGETKEERKARRNANKKKKRHHKKLVKKIDKAQGILDSYDGNCFCLGLDPGLIDIVHVRNQDGKFEFVIKSTEFRDQAGGNHAKKKTDEWRAKAKLVEVDACRSTNCSKVSTLHGYTNFLKHEHFNLVDEPVTQAVSSVRFYGTQGNFVVSQKEMTKQKYTVNRARSIVKKTKFFSKKMNGLVKKAVDFDGHGSYPLVFFGGAQICSTMKGIQGGGVPTVVMRKLFENHFDCEVTDEFYTSQICCDCKARLARCVLVCISS

SEQ ID NO: 4069 - protein, 269 aa, Hypothenemus hampei
MKQEIDDTDDETEKQSHTKRVRKKRKLLNFVYYLGIDPGVVNCVGVCLHSKEGVLKPKEEKGEERNYYLKSATSEESGKWCNEHIQRFKRNKMMKNMKLLAGRNERNKDQDVAFTAKTSHKYEANLEYIKYRMQFFQGSQREYSRRRVTRLKFDYYIRRRRAIDKLELELPPSPPRPRPRPPEKNNEDMDDEAGRPPEDDTEDIQIIEDEPARPPEESNENRKPRRRGFHRYAVCKTCHIVWNRDINAGRNMIMVATQDDVNYRKSTSQ

SEQ ID NO: 4070 - protein, 934 aa, Chlorella sp.
MHSRRASQHRWWLTQLLCLLAAAQSLGCQTALAATFLYFLFRKACNPTDEAEEGPRPAMDVPPDHATITAVKTEHHMCTPGGEEAGWGRAAAASMQDQERPSHMQIFVKTLTGTTIALNANVDYTIADVKAQISDRDGTAPDQQRLLFGGQHLEDGCTLGDLNIPKEATLYVSLRLRGGGVEGDGCGAQAGRVEAMEGLEEPPLRQQRGHQVNDGTDEELRRCLPLVEALAPPGRAPDADAAAQAAAEAEAEAEVEAEVEAAVAAAAEEEDPEAEATAAAQAQAAAETPAKLQRFTIVTGLLSVLKNRALRHPINEAVRDTTLVKYETLTLLGLYVTHYCKEARRRAAEGLEALPAMPYLGATFISHCIRLVTHSDEAPRWNQLPPDELLLSVYHHLYLPSRSNNLRRVNRDRRSEQLNSLAIQLAVNVQLHVRLNFQRFLRRWCSMRLYQDFGEHQPSPRGKVLDRMVNSICAEQCLNTDLPEGLSAAQRAWVQALVTSQRAAHTTLLPADTRELRRQWQKYLPWLHDMLLDIEAYNLQDLRRKRKKKKKKRQQQARVEAAAAPTPWQQPRVAPFSLMPVAAFTPCHITLNSGGLRAMVNTLGKKTKAAGGRASGEKRKRDRAAGGGGADEATAEEHKQQMLLREVELWDAHFDMRPLCTVNHKFALYLTTDGTQASVHMKRPAREPPAPPSLPMSLVGKQLLGLDPGRRHFYTAVSDSDSKEHRDVRRCSTGHYYERAGFTARQRWMERRLAAAGLQGWQSRIPRHATADLAAQQQRVAYVTERLEELVMHYCSAPWRKKKWSVRVQKQRVLANEVRRLTGGRPKEQVVVAFGDGTGGRGGCIKGSRMPPIKQFRQLLQRFATVLVIDEFLTSQRCPRCEAQYTSRVSYAVPVCNHCGTHWDRDVAAAKNMLRIARAEAAGLPRPADLRRGG

SEQ ID NO: 4071 - protein, 358 aa, Graphium doson
MGQAMTVKLKLEPNKAQLELIKLASQEYINVINTLVDEMVKSQAPTQKTTKDIDALINSAVKNQAIRDAKSVFKKAKKTKYKTVPVLKKPIIVWNNQNYTINHESVKMPFVVNGKSQRIEIKANISDYERGLIKTASKLGTLRITRKGRKYVAQIAIERNVKEHTGTKIMGVDLGIKIPAVCCTDENKVKFVGNGRNNKYVRRYHNQRRKKLGKDKKLNAIKKSQNKEQRWMNDKDHKASREIVNFAIQHNVGIIRLEKLANIRKQTSKSRKNNHSLSNWSFYRLAQYIEYKANLVGIKVEYVDPKYTSQLCPKCSRRNKSKDRQYKCSHCGHLDHRDIVGAKNIINAPVLDGDSQVA

SEQ ID NO: 4072 - protein, 348 aa, Graphium doson
MLSMLNERYLNNKDLKMLSYSTLSSLIPQLKREYAWLNDVDSVAIQCTVKTLSETFDRFFKGFCRYPKFKSRKNNRQSYLSTIRGNNIRFNHNQRYIKLPKLGWVKCKSSLKHIENERIKSVTIKQNATGQYYMSVLVTSENQALPKTGKYLGIDLGVSDLAVTSDGQKYRSQKLHLKYQKQLHFWEKRLARRRLKAKAEGIALADAKNYQKARQHVTRVHEKIANTRKDYLHKITTELVENYDVIVIEDLKTNNMIKNHKLARSIASQSWRQFRVFLEYKCAMYDKQCVVVNPYKTSQKCSHCGFDSGKKDLDIRKWSCPKCNVEHDRDINAAKNIMHIGLEQALVK

SEQ ID NO: 4073 - protein, 385 aa, Graphium doson
MALYTYKYRLKPTEEQKQLLSKHFGCTRFIWNYFLAQRKDHYEQNKEAIKNKTIKSPNRYDNQFDLVALKKQENYKWLQEVNSQSLQCILRDLDLAYKNFFKQTHRYPKFKNKNDKQSFEVPQHIKQNANKIIIPKFLKGINFIQHRPCIGQIRHITIHKTPTDKYFASIVVEKERVIVKTDKRGHIGLDMGLIDTIAASTGKKIQNPKTLSLYQNKLKYQQRQLSKKQKGGKNRNKARLSVAKTHEKITNSRKDFLHKLSTQIVNENQVIAIENLKIKSMMKNHHLAKSIGDASWYELRRQLEYKSKFHNRQLIAVDPKGTSKECSKCKYINRGLNLSIRSWRCPKCASEHDRDINAAKNILNRGLLAVGTAVKKRAELSLVGG

SEQ ID NO: 4074 - protein, 705 aa, Anthracocystis panici-leucophaei
MGSITLTNIPRDDLGIGRGPDIYPFYDSGLSQYRLLSRPDQRRMTSVASHSPADTALQHCWLNTKVSTFPSPGWPFETITVIDRDATSFPSDRGRLDPVDIDTEVEAALAGPESDLPNERDLYPLISNSNCLFVKKHRFLKLAPTQTKRNAIDQAVSAKKALITRFTNTPEHLRGPHVNTIRKATKKADSQRGLAIYFAKGSGSISFRMDGTDIVDLALEVAPDCVKRAGGTALDSHVQIHLRGQGQRRFLLEHCLQKPMANGRVKYEFKHEWGIQLDRYGQWHLLFPFDVPTPPALNVSEKTFHGPVVVKGCDPGVRTPMTIWNSSEGTAMEVGCPDDGERLEELRRKMRKLNTRCAQRQLPLVEQPLPARQPRPARNQQQQQPPPAHARQPRELRAPHQRPPQPLTPFALPSSERRKLRVRSKRIGKHIHNLVRDVHSRLAHDLAATSDIIIMPWMEVAKMVRGRQLSPAVKRKLLGWRHCEFIVRLAIKCMDTGTLLLIQPEAYTSMTCGSCGTLNRTLGTITYAHEQIIAAAIDSDIANYSATNTKGQNALAKRHPRPRLPTHLRLRSTMLGLKARMAIIDNSGGLIAECVNVLRNKTTQGLGRVGDEIVVVVQKARPISNTPGQASTQKVRRGDVRHAVIVRTKKEMTRPDGRVIRFDDNACVLLNNKKEPLGTRVNGVVTNELRAAGWGKIASLAPKVI

SEQ ID NO: 4075 - protein, 286 aa, Apophysomyces ossiformis
MDNQALGRLMCISGLRDTLSPVKPDEAREAYFNLFDMSKIGYRTIEDLETEKVLFWDKIRTDGTDVEFIFKKYKAPYDPKKKPLTPSDMKGKFDDALIWGVDPGVASAFVAADGTHGSRHRVRSTSTEEYYSLCGFNHASRVREKYNKQEPAIKDLIDKTPSLKTSDLEKLIIAIRYCIQHYDTISEFFSRNQSSDSKENTCKSSDSKWVPLSANDRPEEKEKPIIIAYGNGAFSGSMKGRKAAPTKAILKELQQKARQRKASTFVYLVDEYLTSQICPVCQKQNL

SEQ ID NO: 4076 - protein, 497 aa, Apophysomyces ossiformis
MMFDILSELEGSEDHTLRKELPFPTKNWLKRRFCTEMSTCDSLSSRQKAKLVSYIRKHITDVVASLPKCIRTQEKIQEDFPKLSTEDCRYLSRFCAKITRKILRGVFAPKIGQADQKLFPLMPTLASISPLVSQRRNPLEAFWAVFDVSKVKTLKTLESAKQSTDQKLWSVATDGYGVSFTFARKKDEVTRDTDASSDSDEEPDDDIEDQGQEEVTTADFRDSLDDYEVKGVDPGLTDVFVSCNGHGKESYEVIKASTKEFYHLAHYHTSRSMIQQMEKGESGDTEHRKKIPSRKTTKIEVLERYILYMLQYRRASIASTISDLPVSGFGANRYIGRQEATEEFASRRSTVEQKNNLNRRRHRLQRRMRKSKRRKKSQQTQRLPVSTLYWQPTYKWKKATPTRSERKSLVAFGNVMFSNTMRGKKDGSGVDNLPQAKGERKARSLCNNRDLRVQNVENMLQLWSGKFNERQMIPVSIVTRCTQMQNLQYCVEPRFEQ

SEQ ID NO: 4077 - protein, 300 aa, Apophysomyces ossiformis
MTDGCSVHFQFSRAKSTQRHSEEPIRLHGLNTNEVGQFYRHVAVDPGIGHLFTASYGHGEEEHEIRQCSTAEHYVITGTGLRNHALDKEKQATGMKDIVSKFPMGKTTENDQYSKYVNYFFTHQDAICSFYHSGRGHSRFDNYQGRQRARGEIANILVHGGKKFLRSNMFDTVLVGLQNQLLGRQREIEDLLVGRRQKEKLDNDDKVPVVGFGNGMFGKGQMNRTLTKLETLDDVTDRSVLDCKTCGTLWNQDVNGIKNLFGIAVSVWSTKKRPALFSRHLTDKTRTNITAANAVFSGGI

SEQ ID NO: 4078 - protein, 334 aa, Apophysomyces ossiformis
MRAAQRWIDYLQHYDAVVGLDFGEVCAAASVRRPREPGLYGSQLTIKRGYLYREYLRQLKTNDGGLRLWKFYFNRSVRRRTRDNEISQRSCLDKACYLITNQARRTFDMNHEMDDNRRCVDEPRLVYAFGLDGMSRKSRRGALAPMDHKIANALYRKVNQKNRNKDRQHADVCTRVDKYLTSKVCCRCSKEGQDRRVDFLRRPPTAACVNCDRTCHRNVNAADKQASLGMVVTTTTTRRPIRACQTQTIVEPPRPQERTRRREKEDKNHSELQAFTPDSDLKLGSPNAPSEFARCDFKVWKYGTAKYMYDIRATRRIEAGENAFPTITPLKPNP

SEQ ID NO: 4079 - protein, 599 aa, Apophysomyces ossiformis
MDLDTQILENVSEPESGAEGQASLASGGLHFGSSRRNESCNLHLRRWVEHCEDDTTFSFPPIMDRIFCRRAYKTVGSSVFQPGHEIWEGHLQETFNTYYDWLRKDSAALLVKDFYNIPRTDGAMGCALCYMAPAIIQTKRATQLVIHHRPLPETLWQTMPLREEVVDFYQVQYDLYHEFLADVEIEEVDPEEKASWELFPNIIVYLYRLHAYAKELNGKQEVFTAFSRFNLFMRNMGIRERFWESLFNFDRCQKNRHRWNSDSAFNTGRAPYENAYFFTTNDVAANLPSSPRDIRLLPRNRDLSRWTRGIYHLNKNPVGLSRERLLGSRIMGLDPGIRSMFTCVDTNESMRERAFRESHTASVSNGQYQKQSMFSWEKHKELQCRETADVEPLHNYTKSYCHRERLMALSRARKVALSGLENKIVHKIKPCDDLPIKTSKSNGKRNPDTTERDGRPVIIAHGDADIRAGSKAPVLLVDEYNTSKVCSSCDETTEEYRAATLRCHHKYDNQCKYEEVPTFFILALNDPRSVVYPIRVRQTAHVEDGPTVGTVFWNRDVNAGKNIRCTLVRYMESDHDLGSRPESLQRGTRSEQEPTYLEN

SEQ ID NO: 4080 - protein, 278 aa, Apophysomyces ossiformis
MFRSLATDGYTAAFTFSRRRQHLTEDKKSAKTMKDFQGDLHRFDLIGVDPGITDAYVASNGHEKYSHEIISSSTKEFYHLAHYNASKAIMDRMKNEKPKIQQIEKDMPSAKTARISQFDRYARFLLLHHVDITPILRQKVCKPPFLAASDEFAERLISGGSKYPTKNTRNQRRHRKQKKKRRKRQNKTKARTVKRTKISDTEPSRRRLDSSLKNRSRTSCRRLPNTFARNKWLKATQHPTKRKPLFAFGSAMFNRSLKGIRAGISNIIRRKLKENEAR

SEQ ID NO: 4081 - protein, 1060 aa, Apophysomyces ossiformis
MSRPKKRRLQYDDMPQASDYIPLNSVDDAKNALTAEFFDFVISSIHGLQQAHDREVADDDPRFWDRPDEKLDDLHNRLLAKKRVPRGTLQKIEDKAGLKRNSFGNKFKQQFRFVDLWKEFVKSEFQTCRQTAYDDYLSGRSVQSQPNAVIAPKNEQIRTCSTSIESILNIDIKKDESLKKRIISKLNSTSVQATDLSSDLSAIVFQTMLKLAVGSGEEADWPDESGQRLPFTVSSEVVSQYGTNFKNMWSGNLFTVLLNHVLRILLRLHLSPGREHKYVDMVAKKAEEKLEKQSLTKKCTSEKKNLRDVVRREKHKISKLRKKLQSEKDTNIKKKLERKISTSEGRLKYFLVKGTKTEMAYSGEDSRLELLLSHLPQHEALEMIMEDSDDEDSGSNGDMQNLNKGQMSKQPDKKKRKRNPDTYSDDKETSRRKQRSIQAVLRKLLLVDMKGTLTADVVNSNWDGEDLTTKEMDTVLLIYRNLHSFVPVAGNKAPIASQIPFVLLANAILRATGYDKFTRSVCPYVRPSQIHAIALDSCAIYQLFGKRQALGYKRAVFGSLFDLDAVDRICEQHGLQFRERITITSFKTAIITGSTSGKKRRPESSYESRKKLRRNRQPQAALKGSQAELKTDIQKLTGLIKQHEANTKRISREVTKEGRDVTESKKEIITLSRLRAPNLSKKKSDMISRLRQAKRTRAEKQLALNTEKRKLSDARARKYQARKALEMLQQKDKKKRKKAENSEPDDSFPTLQKPGCEDFAQHMKLDKLPDSSITYAGTDYGVVTMSTTVSIPPPRYNFHMELYNRYQTLDGSEDKSSIELDTDKKRFLQLPKPFRSTAADLDWTTRSRAARKSRERRKKTTPEGRAVVKAEKLLSENSIKWSNTVAQANERHKRRKTLEERKHVLREGGEGKNIAVLCIGTQGTGVGLRIGGHARRGGSWMRRFHRQATPVAMTNEYRSSQTCVFCFEKVSRPKRRTIVDGKNKPVSVNGASLCQNPQCISVRTGHAVQGRDTMTAVAIALAGISAMRTGSALRPFRPSDNISQFNADLKDLDTSTLSAG

SEQ ID NO: 4082 - protein, 539 aa, Apophysomyces ossiformis
MKESEIQNIASEYAFKHIAGGSPQWPNSIEPDLPLVAIVDKISLDLTRFGFNSLGDFTGNANHRFAYRILSDGFAVNLVFARKQKEKVPATEIDLEDFTTDEVEQWFEPWTVDAGLNQIYTAADGSDSQSHQVRRVSTKEYYTMTGSTRKAKQLKKQKDAAGITRIETGLETCKTGPDMAEKRFNNYQPVQRACEELVYVLVNGWKKYFCKHCRTLWQRMFYITNSVWRGQGRPIEFCRPAKNDIATTNMVSSITDQRFQEEEPSAAKKQKMDDMNSGSEGEYARYWTDWFLDLRGNEYFCEVDESYIMDRFNLTGLNAEVQQYYSEALDMITDNLGKETNSVNIDETEDADCFCFFGDCCLLIEEENLDDKAREQIEKAARHLYGLIHARFIITTRGLEKMLDKYKNASFGRCPRVLCNMQALLPVGLSDVPLTETVKLYCPRCEDIYNPKSSRHAALDGAYFGTSFPHMLFQAKPSFLPTKTYERYVPRIFGFKVHEIAEQHRWQDKARKEFEEKLRQRQQRLQLPRDESSSTKPPA

SEQ ID NO: 4083 - protein, 413 aa, Apophysomyces ossiformis
MTGEIGSLYTWSLKRFEQKIAITEGKPQKHVSTAYVHRMVEELVNTNPLSKRLRSSLKYAVREAIRKKSLLRLPKRFKPLPEAEMASLETFIKETIVAIESHTFAPEKYTDPKGTRKFTMLPVYTFQMRHVTVDNQALARLLFQTGRRENQTPVHPSETRREYFDLFDKAKIGYPTYESLENEKTVFWDVIRTDGMDVEFIFKKYKEPFDPKKKPLTPANLKGKYDNAVIWGVDPGVSSVFVAADGNPSSPHRVRTTTTTEYYSICGYNRANQRRKQYMDAAPEAKKLIDDIPSLKTTDLQKFTDSAKYIMQHYETITEFYSRDLRYNKLKFKSYIGRQKGRAEIAKTLLSGSKKYNSDSSQNQKMPNEKKWVAHCPNDEHDERNGPIIIAYWQWDFFRLNAWSGGCPNESDS

SEQ ID NO: 4084 - protein, 889 aa, Apophysomyces ossiformis
MDMLFQFYGPHRAEARFRGYQGVQRAKEELVNILAFGGKKYNCSRRKWTRSNRKSRKRKRKNWKKQVNKDSEVGNRLHQSLPQPNTSAERSTLNKTKRLPHWRQKKFIVERKVPLIVFGDGMFNNRCKYKGHQKGVVNILWRSLKRREKREKLLVLTIDEYLSSQVCHSCRCRSLQKLTTADCVSHYSILVCKNCKMLWDRDVLASEHIDTYQARNHLSDAKKTINMPPKKAAKADVSENEPLSKAQEEEMSSALIAKLLAEDAANGNDDYYAEYSNDVKGYDPYHGTDERDDSYEEESEDDYAPKRNGKGRGRGRPPKSRRGRKRKIVTTEESTQDASSAINTEKPAEEGQTTEPSPAKSNEAKPVSKKPRKPVPEGYNTGNYSEEEEKRFLEGLELFGRDWTKLQAHIATRDANSIRSHAQKHLIKLFRDGIPLPEKVRETGEGYTLSGKPLDPNSAAAKPYLMRMGMCTETPKTTAVQKPAETVQDSSTETSPKETSNEDIQKFGNATKDAGSSPKASDVLPSKPSPPAVQSQDSPKIKKRKQRSRSSSVERVPSAYDESGRTNYSKLRLRQPRDRTSVNHSQLGKDDDPLTMVKCEPFIGKPGSDTSGSQPFQILVHSNVLLSMDFHAHLMTTEIIGFLAGEWDKQKMLMTVKKAYPCRSLNTGHNEVNVEMDPTSAIETRQLIEENNMKVVGWYHSHPTFIPDPSLVDIENQRNYQILCRDECLEGNQNKTVEPFVGAIVGPYDPRLPGSASVINWFYVGDSRHERAIPKRLIYDLQEDECVSDEEADRLFNLLEVYKESEEKVDFSDRWRRDIQESKLAKLIKSLGMRMPWIQNKLRQQPMDEAMSTTGEDEKSSENQTEAESEDSIIIDPFLEKVQARLKDW

SEQ ID NO: 4085 - protein, 1129 aa, Apophysomyces ossiformis
MSRDGDLFAYQGALDVPRITKMNWRHGPQRYNGTVSTKRGLLTAFMGLQAAITDEQAINAQIRFVILEATCGNNYAKNLRGKSFKRVKAALSRLLEPAPELNEGVIEEEDTGPHAPKAGKKQTRPAKRGRAGPSRRQAQFIRAAASGEIRDSFLEKITYTEEDTGHHITLYQSSRYVATADAGLYSSVLAAAIERARRRNRPDQEGIDEASLIEKVMDKVVDDMSYVRYVGYHIANIAIREAYNLDNDTMLSFYELFFRNGKRTAQDLWRHNLYCATNYQTMGKREPTLATRQAASEAQYIAQSDILHSDSQLRGHNDDRTNLFKAFTADTAFFYMSRMLTTPLERNVLLKARKLWYQDCSAEMCIASTPMYMGEMVTEVANGASVDFRKNIVYNFKHRYSDCLRSRLKEVARVPVGWPAPDQGRFDEFIQDIINSVHDGIQHVAAEERQPRFQYIAEANIREQVNKFVTNTVNRYKSSIEAFDGHRCRLEVENHATVPQGWPRNRDKLIAALFQRIWGMSIDISEAGADQENLEEYIEDFITAERNLQVKGIRVSEVNLSECLGENGRQGTNGGNDDEENGDEDDEDDVLHRTYGGKLSKARAVRLIPFMVYFLERREGNSQSSVLCPLQAHHRIAIPFNLSFTTTLLTRIEHFSRAIIQQLEQELTAGRNDRRIAELTRERDNLRNACARLQGIKSRDSFSALFDIRRQATITRDGGVDVRDRGYMRWLNQRIRGNENKLRFSRRRVFCTDRVRLYCIYNVWLRSRRGNTTCKYLTELWRTTRETLKDTWQAGSPGNQYDYLQHYDGIVGLDFGEVCAAASVFRPREPGLYGSQLTIKRGYLYGRTIPNRDWLEARKAANNIDDIEAALSEGPPGSTYDRYRKCTFDMNHEMDDNRRRVDEPRLVYAFGLDGMSRKSRRGALAPMDHKIANALYRKINQKNRSKDRQHADVCTRVDEYLTSKVCCRCSKKDRARLENDAREKEQRVLRCENCGHTFHWDSNAADNQATIARYMLRFQQRPRCFIHPSRHLEAAGEEEAMVTTGRAGLQQRASGGEVTEVPGIAEPRRHPSQEAAVITPTARRRTRASQTETMVEPPRSRRRISRREEERSESSRAPLRRSERQQAKR

SEQ ID NO: 4086 - protein, 237 aa, Apophysomyces ossiformis
MFRSLATDGYTVAFTFSRRRQHLTEDGNLAKTMKDFREDQHRFHLIGVNPGITDVYVASNGHEKYSHEIISSSTKEFYHLAYYNTSKAIMDRMKNEKPKIQQIEKDMPSAKTASISQFDRYARFLLLHMSTLHQYYDRRRIGRQQASDEFAERLISGGSKYPTKDTRNQRRHHALSLTWTSRLRLESSLENRNRTSCRKLPNTFARNKWSKATPHPTKRKPLFAFGSAMFNSTLKGT

SEQ ID NO: 4087 - protein, 390 aa, Apophysomyces ossiformis
MVNTNPYIPDNIYDFWNQFRERHLAIAFPRNNFTGYSNALYAACKILRDPYINDMVDNSQQRVCGFIIHRLQTLVPDLSKASASQIVYDICTRALAVMYEQEHQQSDDEEPGNLPRLFSLALKPSFLLRFVTINAKALSRWFKSETIQTIMKPKTVELELEHITAEDINKYCRACGIDPGVRHLYTESYGADKTEHEIRRCSSAEYYYMTGSPQRGQQLLKQKRHQGIDTIESNFPTAKACDIRKYNGGLDYFFLQKDALFNFYGPNDRERRFRDHQGRQRAAEELANILIDGGCKYNHRKRKYRSANRKKRKKNHGQHIRHKKKNIGRIPEQPLSAVRSTVDESRRARSWKRSQLNPDNNGKMPLFVFGARMFGKNKCRYKGHRKAAVN

SEQ ID NO: 4088 - protein, 504 aa, Scenedesmus sp.
LAVAGELLDRLDADAAVLYQHLAAEVLEDGLAACRAAELQADSAIAALRQRNPGLPGDAAPRARAAAFAPGVDDALLARLRKLSEARGRCDALAGRRGFSLQPRQHYGRVHLHLFETAQGHLHRDTLELQRAACPGFDLEAAAAPPSRDPLPPWRRPARPGAADRRAFKADDRARAQAALAAGGAVLDAAFDPARPAAPAAVAALGRTLAWGWDPGLGDIAACRALSHPACGCTRRGHRTAAQHRCPAAHDARGGADVVTLSMRGYRDASAFNNRTRNQETRGRGRLGYLRRRVEHRARAPAAVLFVGSASAGRGSIIARPQDAPVKTLVRFGERHGYCVCMIVNKCWTSQVHHACMAATTNAAPGMNKRDGFKVRQCYGTCRTDAVPPRPLLFNRDVNAAANIAALGLAQTFVNADRQRLLAAGFTEAQVGLASTTAGAAATRAVRAAARATRGRDRGGCGRGGGRGRGGGRHGRGGRGRGGGGELTPPQSDGDDMDWEPGAG

SEQ ID NO: 4089 - protein, 995 aa, Scenedesmus sp.
MTTKSRRVARDFVVMLGQQHMFAACAPRLADSLAAQQGAAARPALEAMLRRAASLGAAPEPASAGALAAAVESLAEALDGSSGRSGSGSGSSSSRSRGQRPPAPPKLLDASAQEPRLRELQRARELGKLEAAVQRLRAAVDASEAAVRLRKEPLKDLQREVASRAAVQGGMTGPPDHARNRLRRLQRKDAHAAALRRRLAVAEARLLRARGQGAAPGAAPGQGPGAAPGQGPGAALPAAAAERLRLALAALTAAGDATVEADLAAVEAEWQAAVVQHHERDAALVQHQRRLARPHGAAAAPDADAARRAADAARAARDQGARLLGDCGARLAAARGYLAAARGYLAAARGYLAATAAAQGRAAPAPPAQQQQQQQQQQPPAPRTLEEAAAAVAALRRDVPAGWRRAVCATLEAVLAAATAAGAGPPPAAPAPPGGRSGGAQPPQRAGGAGQHPDALIAVAGACKVLRALRSRHAARVALPKRRAFTLAPVPKYGTQHLHLSTSGMQALDAALRARQAKALAGGQPAGQPPPPNTAPPGGGAPPPAPPPPHGDYDPIWDSYFDFGRHPGRARGVLHANTRFAGSVTFDLAALHVRVRVEGAADPAPRHGQQSRAAKAAQRAAEHRAGAAAARRLLCDALAPHGVADEAALDALPLDPCELRGVDGLPPGHALHGAAAAVHAGVRIVGIDPGRARMICAATWRQGPGCTRVAHRRIAQRRCPNAPRHRGDHGRRYEAERIIRIKTAAHRDSRGIERHRLWQQGRPGRPGRYERRPPGGGDCVHACLNRVPAYSGTSVAAAGAWRNGRVHHVLDNEFAYSLLACRAECAWRLRKHGLKQRALHAAIQLTAYGRVFVRGRVRQHARLPADLPAVVLGIGDASLGMGGCISGPGPPRQALLALLRTYYARRRVAAVLMDEHRTSITCSVCGARVEKLRGIYGLVQCPGCTVVAPRDDNAARNICALTLHELLRGGRGTAGGARLAGAFRQAAAAAVDPPA

SEQ ID NO: 4090 - protein, 301 aa, Scenedesmus sp.
MRAPAAGTEVRKQRNEACRAAGRAALKEKVPDRGAPPDRAAGGARALHVRVRVEGAADPAPRRGQQSRAAKAAQRAAEHRAGAAAARRLLCDALAPHGVADEAALDALPLDPCELRGVEGLPPGHALRGAAAAVHAGVRVVGIDPGRARMLTAYGRVFVRGRVRPHARLPADLPAVVLGIGDASLGMGGCISGPGPPRQALLALLRTYYARRRVAAVLMDEHRTSVTCSVCASRMEKLRGIYGLMQCPGCTVVAPRDDNAARNICALTLHELLPGGRGTAGGARLAGAFRQAAAAAVGPPA

SEQ ID NO: 4091 - protein, 1287 aa, Scenedesmus sp.
MQLSAQRSAAAQRPAAASRAAAALPRCSLRAAPFTAPRQQSGLASSCSSALAPARRGLQAPAARAGRAGVRSLAVRSEISYVMVKPDGVQRGLVGDIISRFERKGFKLVGLKLYQTPKEVAEEHYKELSAKPFYPKLVEYIVSGPVVAMVRRSSRARARVPGSGGGGAGGAAAAARLTRRGARARAQVWEGAGVVASARKLIGATNPLAAEPGTIRGDFAIEVGRNIVHGSDSVENGERETALWFPEGTASWDQTMTPWLKDPAYFPTRQAPSPTQDCPVDRATGARALLAAQPARAAMGSLTGGGTSGARSGGGPPGPPPARGIDPAECAAQPVEGADWEALCRHAQARGEAARAAAMAAVLSAPAASVGTSASSAAASSDEEEGGPAAKRARGADAAQRRSRGRGRARSRGSAKAATRGGRTPSRGGGRARSRGGAAAAPRGRRKRSRGADEASGRASPARGAAAAEAGDKAGRQQQALPRHFAKRAKTRTEQAKKAAAGSGMRVRVCALRGAVRKPERRCPNAPRHLGDHGRRYEAERIIRIKTAAHRDARGIERHRLWQEGRPGRYDRRPPGGGDCVRACLNRVPAYSGTSVAAAAAWRNGRVHHVLNNAFAYSLLACRAECAWRLRKHGLKQRALHAAIQLTAYGRVFVRGRVRPHARLPADLPAVVLGIGDASLGMGGCISGPGPPRQALLDTYYARRRVAAVLMDEHRTSITCSVCGARMEKLRGIYGLVQCPGCTVVAPRDDNAARNICALTLHELLRGGRGTAGGARLAGAFRQAAAAAVLPPASAQPAPTEMRTAALGRASSSRVARARSGAGVVPPFGQFGRAMLPTPHRGRSGRLRASGVASAERLLKTVSSEALSDEEVKKLLQRPRIDFTSILSTVGPIVEQVRAEGDAAVRALTERFDKVKLDDVCVATEDLPWPVLPEEVSRAFDVAYANIRAFHEAQRGADLSVATMPGVTCRRVTRPINAVGLYVPGGTAVLPSSALMLAVPAQIAGCGTVVLATPPRPDGSITPEVLYCAKKAGVTHILKAGGAQAVAAMAWGTGSVPKVAKIFGPGNQYVTAAKMALTNSEAMIAIDMPAGPSEVLVIADEGANPAHVAADLLSQAEHGPDSQVVLLALPGVDLDAVQAAVQKQCDELPRNETARKALSHSCVVQVRDREEACRISNAYAPEHLIVNVDDPEPWLPLLDNAGSIFMGRWTPESVGDYASGTNHVLPTYGYARMYSGVSLDSFTKKMTVQSLTWEGLQVLGPHVAKMAEVEGLEAHRRAVTLRLEQGS

SEQ ID NO: 4092 - protein, 1333 aa, Scenedesmus sp.
MAAPGAGRLLDYRAPTSWSEDAALFERARPWRKVALAVGLCALGTVMLITGISLWYTGGPEGGAATALLVLGSICFVPGAYHTRIAVLAWKGVPGYSLDAIPDMKQQTEQAKKAAAGSGMRVRVCALRGAVRKPEVVPYLEALVCAYSRLGILGRDAHHVALVYGASRLYGLDTRQPPPQPAAQEQGPQQPQPPPAAQQAQQPAPPPPACACYLQAACGGAPLVYDLMNFFSQGNWRRVGGGLSSDLRHALEQACGVNELQRVPLPAWVTGRLHHDLVNPLAELYNTNLQLHLADGERLEKALDAAALQAWFAAGCAGTPSRAARDCLIAGGAALLYSASPLLWERQGVLQPGEGVVPAAAGDGQDAGRLRLAMAMMRDMLARMRLHLEQPFPAAADGEARAPAAGAARTRQAAGAQATPGLQRWESDEAAGKHGRVLDWARSGMPRAPDAGAQAGGAPLVPQPPEPLAHGAGAAARQQHDAAYDAWRAALARQLEGLAYREGDADAMARRVARDFVVMLGQQHMFAACAPRLADSLAAQQGAAARPALEAMLRRAASLGAAPEPASAGALAAAVESLAEALDGSSGRSGSGSGSSSSRSRGQRPPAPPKLLDASAQEPRLRELQRARELGKLEAAVQRLRAAVDASEAAVRLRKEPLKDLQREVASRAAVQGGMTGPPDHARNRLRRLQRKDAHAAALRRRLAVAEARLLRARGQGAAPGAAPGQGPGAAPGQGPGAALPAAAAERLRLALAALTAAGDATVEADLAAVEAEWQAAVVQHHERDAALVQHQRRLARPHGAAAAPDADAARRAADAARAARDQGARLLGDCGARLAAARGYLAAARGYLAAARGYLAAAAAAQGRAAPAPPAQQQQQQQQQQPPAPRTLEEAAAAVAALRRDVPAGWRRAVCATLEAVLAAATAAGAGPPPAAPAPPGGRSGGAQPPQRAGGAGQHPDALIAVAGACKVLRALRSRHAARVALPKRRAFTLAPSRAAKAAQRAAEHRAGAAAARRLLCDALAPHGVADEAALDALPLDPCELRGVDGLPPGHALHGAAAAVHAGVRIVGIDPGRARMICAATWRQGPGCTRVAHRRIAQRRCPNAPRHRGDHGRRYEAERIIRIKTAAHRDSRGIERHRLWQQGRPGRPGRYERRPPGGGDCVHACLNRVPAYSGTSVAAAGAWRNGRALLALLRTYYARRRVAAVLMDEHRTSITCSVCGARVEKLRGIYGLVQCPGCTVVAPRDDNAARNICALTLHELLRGGRGTAGGARLAGAFRQAAAAAVDPRPRPRRTRALSAAAAQAAPGSAASTRLAAAAPGRMGARRAPRAAC

SEQ ID NO: 4093 - protein, 708 aa, Scenedesmus sp.
MAQHHERDAALVQHQRALARPHGAAVAPDADAARRAADAARAARDQGARLLGDCGARLAAARGHLAAARGHLAAAAAAQGRAAPAPPAQQQQQQQQQQQQQQQQPRAPRTPEEAAAAVAALRRDVSAGWRHAVCATLEAVLAAATAAGAAPAPPGGRSGGAQPPQRAGGAGQHPDALVAVTGACKVLRGLRSRHAARVALPKRRAFTLAPVPKYGTQHLHLSTSGMQALDAALRARQARAPAGGQPAGQPPPPPPPPPPTQEGGGYDPVWDAYFDFGRRPGRARGVLHANTRFAGSVTFDLAALHVRVRVEGAADPAPRRGQQSRAAKAAQRAAEHRAGVEAARRLLCDALAPHGVADEAALDALPLDPCELRGVEGLPPGHALRGAAAAVHAGVRIVGIDPGRARMICAATWRQGPGCTRVAHRRIAQRRCPNAPRHRGDHGRRYEAERIIRIKTAAHRDSRGIERHSLWQQGRPGRPGRYDRRPPGGGDCVHACLNRVPAYSGTSVAAAGAWRNGRVHHVLDNAFAYSLLACRAECAWRLRKHGLKQRALHAAIQLTAYGRVFVRGRVRQHARLPADLPAVVLGIGDASLGMGGCISGPGPPRQALLALLRTYYARRRVAAVLMDEHRTSVTCSVCGARMEKLRGIYGLLQCPGCTVVAPRDDNAARNICALTLHELLRGGRGTAGGARLAGAFRQAAAAAVDPPA

SEQ ID NO: 4094 - protein, 501 aa, Scenedesmus sp.
LHANTRFAGSVTFDLAALHVRVRVEGAADPAPRRGQQSRAAKAAQRAAEHRAGVEAARRLLCDALAPHGVADEAALVALPLGPCELRGVEGLPPGHALRGAAAAVHAGVRIVGVDPGRARMVCAATWRQGPGCTRVAHRRIAQRRCPNAPRSRDDHGRRYEAESIIRIKTAAHRDSRGIERHRLWQQGRPGRPGRYDRRPPGGGDCVHACLNRVPAYSGTSVAAAGAWRNGRVHHVLDNAFAYSLLACRAECAWRLRKHGLKQRALHAVMQLTAYGRVFVRGRVRPHARLPADLPAVVLGIGDASLGMGGCISGPGPPRQALLALLRTYYARRRVAAVLMDEHRTSVTCSRAPPPAQARSEQVQAQQVQAQQAQEQQRRRRPRRAAVAAAAAAASLLLAAGGASAGPPAAAFAAKCAGCHVGGGNIVQAGATLFAPDLARNGVDSPAALYELIYAGKGRMPGFGADCAPKGKCTFGARLSDDEVREMAAFVLDRAAAEWKD

SEQ ID NO: 4095 - protein, 1482 aa, Scenedesmus sp.
MAAVLSAPAASVGWSAGSAAASSDEEEGGPAAKRARGADAAQRRSRGRGRARSRGSAKAATRGGRTPSRGGGRARSRGGAAAAPRGRRKRSRGADEASGRASPARGAAAAEAGDKAGRQQQQALPRHFTKRSKKRTEQAKKAAAGSGMRVRVCALRGAVRKPEVVPYLEALVCAYSRLGILGRDAHHVALVYGASRLYGLDTRQPPPQPAAQEQGPQQPQPPPAAQQAQQPAPPPPACACYLQAACGGAPLVYDLMNFFSQGNWRRVGGGLSSDLRHALEQACGVNELQRVPLPAWVTGRLHHDLVNPLAELYNTNLQLHLADGERLEKALDAAALQAWFAAGCAGTPSRAARDCLIAGGAALLYSASPLLWERQGVLQPGEGVVPAAAGDGQDAGRLRLAMAMMRDMLARMRLHLEQPFPAAADGEARAPAAGAARTRQAAGAQATPGLQRWESDEAAGKHGRVLDWARSGMPRAPDAGAQAGGAPLVPQPPEPLAHGAGAAARQQHDTAYDAWRAALARQLEGLAYREGDADAMARRVARDFVVMLGQQHMFAACAPRLADSLAAQQGAAARPALEAMLRRAASLGAAPEPASAGALAAAVESLAEALDGSSGRSGSGSGSSSSCSRGQRPPAPPKLLDASAQEPRLRELQRARELGKLEAAVQRLRAAVDASEAAVRLRKEPLKDLQREVASRAAVQGGMTGPPDHARNRLRRLQRKDEHAAALRRRLAVAEARLLRARGQGAAPGAAPGQGPGAAPGQGPGAALPAAAAERLRLALAALTAAGDATVEADLAAVEAEWQAAVVQHHERDVALVQHQRRLARPHGAAAAPDADAARRAADAAHAARDQGAPAAQGRAAPAPPAQQQQQQQQQQQPPAPRTLEEAAAAVAALRRDVSAGWRRAVCATLEAVLAAATAAGAGPPPAAPAPPGGRSGGAQPPQRAGGAGQHPDALVAVAGACKVLRGLRSRHAARVALPKRRAFTLAPVPKYGTQHLHLSTSGMQALDAALRARQARAPAAGQPAGQPPPPPPTQEGGGYDPVWDAYFHFGRRPGRARGVLHANTRFAGSVTFDLAALHVRVRVEGATDPAPRRGQQSRAAKAAQRAAEHRAGAAAARRLLCDALAPHGVADEAALDALPLDPCELRGVEGLPPGHALRGAAAAVHAGVRVVGVDPGRARMVCAATWRQGPGCTRVAHRRIAQRRCPNAPRHRGDHGRRYEAERIIRIKTAAHRDSRGIEQHRLWQQGRPGRPGRYDRRPPGGGDCVHACLNRVPAYSGTSVAAAGAWRNGRVHHVLNNAFAYSLLACRAECAWRLRKHGLKQRALHAAIQLTAYGRVFVRGRVRQHARLPADLPAVVLGIGDASLGMGGCISGPGPPRQALLALLRTYYARRRVAAVLMDEHRTSVTCSVCGARVEKLRGIYGLVQCPGCTVVAPRDDNAARNICALTLHELLRGGRGTAGGARLAGAFRQAAAAAVDPPA

SEQ ID NO: 4096 - protein, 2048 aa, Scenedesmus sp.
MEPEPPPPPPPIGGGQQEAQQRAGAPAQADPAHPVAPAGLFALPVLNWGAPQPAPQPAAPAQPRPPPAGAGWRRAYRGPAEDDWLQPPEQHQQQQQQQQQQQQQQQQRAGAAPRHPPAGGGFAYQEVVRGQARQDLPGHDCAQCRDFYDALSTWGAPAPGTTMLLPCAHALAPAALQAASRHRAKHAPPETPPGFWDIGFALGGGGRGSPGPSSSSSGSGSVSGSGRRGGSPAPRPDDAPVPAPAPPPPVAPQQRQPQPAAPRGAPAPAPPPPPPPPEELMAPAGTCSGAQLRALQYELWRCGLELVHGRADGLCAYYLIAAAMLGLLHTALPRQPHEDVRTFDAATMPVLEEQALQLRALTARRVLELGLNDAMHDSGVPWREVFVDAGGEAAVRALAQRASEGNLLVLFALPAAAAPAFAPLFGAQNPLPLNHWAAVVRARRPPPRSPPALLGQPREPPRGAPAVLQQAREPPRGAPAQQRLQEAAPRAAELAADSSDEEGGPAAGQPLQPLQPLQPQQLGRKERRGKGNGAAAPLGTSNSDSSSSSRRRRRAATAAAIDAAWEKPVERGAELDASKARAEAAGPSDEDVRRSKQRASYDAKHARRGGGGTSRARSDSAGGSAGSSTGGGTSGARSGGGTPGPRPRAHRPRRVRGAAPAAEAGDKAGRQQQQALPRHFAKRRKQQTEQAKKAAAGSGMRVRVCALRGAVRKPEVVPFLEALVRAYSLVGILGRDAHHVALVYGASRLYGLDTRQPPPQPAAQEQEQGQQQPQQAQQPAPPPPACACYLQAACGGAHLVYDLIDFFSQGNWRRVGGGLSSDLRHALEQACGANELQRVPLPAWVTGNLHHCLLAPLAELYNTNMQLHLADGQRLEKALDAAALQAWFAAGCTGTPSRATRDCLIAGGAALLYSASPLLWERQGVLQPGEGVVPAAAGDGQDAGRLRLAMAMMRDMLAQMRLHLEQPYPAAADGQARAPAAGAARTRQATGAQATPSLQRWESDEAAGKHGRVLDWARSGMPRAPDAGAQAGGAPLVPQPPEPLAHGAGAAARQQHDAAYDAWRAALAQQLEGLAYREGDADAMARRVARDFVVMRGQQHMFAACAPRLADSLAAQQGAAARPALEAMLRRAASLGAAPEQPSAGALAAAVALLAEALDGSSGGSGSGSSRSSRSSRGQRPPAPRKLLDASAQEPRLRELQRARELGKLEAAVQRLRAAVDASEAAVRLRKDPLKALQLEVAGAAVPDRHARNRLRRLQRKDAHAAALRRRLAAAEARLLRARGQGAAPGAAPGQGPGAALPAAAAERLRLALAALTAAGDATVGADLAAVEAEWQAAMAQHHERDAALVHHQRRLARPHGAAAAPDADAARRAVDAAGAARDQGTRLLGDCGARLAAARGLLAAARGHLAAAAAAQGRAAPAPPAQQQQQQQQQQQQQQQQPPAPRTPEVAAAAVAALRREVSTGLRRAVCATLEAVLAAATAAGAAPPAAAPAPPGDRSGGAQPPQRAGGAGQHPDALVAVAGACKVMRALRSRHAARVALPKRRAFTLAPVPKYGTQHLHLSTSGMQALDAALRARQAKAPAAGQPAGQPPPPPPTQEGGGYDPVWDAYFHFGRRPGRARGVLHANTRFAGSVTFDLAALHVRVRVEGAADPAPRRGQQSRAAKAAQRAAEHRAGVEAAQRLLCDALAPHGVADEAALVALPLDPCELRGVEGLPPGHALRGAAAAVHAGVRIVGIDPGRARMICAATWRQGPGCMRVAHRRIAQRRCPNAPRSRDDPGRRYEAESIIRIKTAAHRDSRGIERHRLWQQGRPGRPGRYDRRPPAGGDCVHACLNRVPAYSGTSVAAAGAWRNGRVHHVLDNAFAYSLLACRAECAWRLRKHGLKQRALHAAIQLTAYGRVFVRGRVRPHARLPADLPAVVLGIGDASLGMGGCISGPGPPRQALLALLRTYYARRRVAAVLMDEHRTSVTCSVCASRMEKLRGIYGLMQCPGCTVVAPRDDNAARNICALTLHELLPGGRGTAGGARLAGAFRQAAAAAAVGPPA

SEQ ID NO: 4097 - protein, 1559 aa, Scenedesmus sp.
LAAARGHLSAAAAAQGRAAPAPPAHQQQQQQQQQQQQQQPPALRTPEEAAAAVAALRRDVSTGWCRAVCATLEAVLAAASAAGAAPLAAAPAPPGGRSGGAQPPQRAGGAGQHPDALVAVAGACKVLRALRSRHAARVALPRRRAFTLAPVPKYGTQHLHLSTTGMQALDAALRARQARAPAGGQPAGQPPPPPPPPPPTQEGGGYDPSRAAKAAQRAAEHRAGVAAARRLLCDALAPHGVADEAALDALPLDPCELRGVEGLPPGHALRGAAAAVHAGVRVVGIDPGRARMVCAATWRQGPGCTRVAHRRIAQRRCPNAPRHRGDHGRHYEAERIIRIKTAAHRDARGIERHRLWQGGRPGRPGRYDRRPPGGGDCVHACLNRVPAYSGTSVAAAAAWRNGRVHHVLNNAFAYSLLACRAECAWRLRKHGLKQRALHAAIQLTAYGRVFVRGRVRQHARLPADLPAVVLGIGDASLGMGGCISGPGPPRQALLALLRTYYARRRVAAVLMDEHRTSITCSVCGARVEKLRGTYGLMQCPGCTVVAPRDDNAARNICALTLHELLRGGRGTAGGARLAGAFRQAAAAAVGPPGVSGVRAAGVETTGRRSHGGSEAGEHAARGSPPKADGRALSESRDDTLPGSPSVKGRLSIPAGGAAVGGRARARARGDSSSGLGAAPTRPTMAASPKQQRAPRGGGGRAAAAPPGRPLLLLAAMTGALALLVGYALHTFFLWTPPPQPLDAPGARFSEARAREHVRVLTQDIGVRSVGTPGLQAAHAYIRERCAALQRAAAGSGLVVETATEHYSGSTPFDFVGDRFINAWHNITNIMLHISRADAPRDAPAVMLVAHHDSPVGSPGAGDDASNVGVMLELAANLSAAAFMQSSPWAARVGVFVNLESIGPGGAPIVFQHAGAWDVFDLGLVLGDTDFRQLSYLHRGGLPGIDIAYLLAGAAYHTDRDTLDAIRPGEMGETLTGAVASLGDALAAAGEHSPAALAALLAPREHKRFFLSVAGKAMLTYSTATAEVLHVLPLAAVLAAPAALAALAPDTALPPRRALAVVAGGAVKGGATLLASLVLPAGFGAARACLTGRPLAWFAAPGVAFATYLPFTAALLLLPWSGADYFASPGGAGLLPLHMLGGALTNAAIAAALTRAGIGMAGLFALWGAGGVGAALCVSRGVTPARLAGALACVAWPVYSAAESALVTAVVMMERMSLTGHAFAGLGDAIVGVMLGLSVVSLTGLVLLPLVQALLRPRAARSAAVLLLAAALIAAALTSHSRAYAPYSAAKPKRLLLAHLHFTEPAAPPPEDAGRGGGDPAEPGAPPLVMRVANASWALAGTDSTPVSLLARAMGLDPASALPARGGEWDVVYPISKLVDVLLFPAPPARGVVAALPHVRLLGARAARGPAGELLVEATLSVFSAKPCWATLKLAAPRLHSWALHDGEGWTDAAEFAAGVASGSGRAVPRGAGPAAAAGARSVLIKWTSEVQEGPLRWPLRVRLHAPPGGAVGGAALGLDAELHVGYVERTAALAGMQARMPPWSTLSYEGTTYISSWSW

SEQ ID NO: 4098 - protein, 1367 aa, Scenedesmus sp.
MVLRRRGAAARGAGRRGGGDAVAPAGRAASGRERPRSRRALTSRVGHHLAAAGPRHRPRGSHTVTPGSAGRRVRPAGQGLRAQQQRSATGLLGPQAASAPLPRRFCLGTARPEGGPDALPLDPCELRGVEGLPPGHALRGAAAAVHAGVRVVGIDPGRARIVCAATWRQGPGCTRVAHRRIAQRRCPNAPRHRGDHGRRYEAESITRIKTAAHRDARGIERHRLWQGGRPGRPGRYDRRPPGGGDCVHACLNRVPAYSGTSVAAAAAWRNGRVHHVLNNAFAYSLLACRAECAWRLRKHGLKQRALHAVIQLTAYGRVFVRGRVRPHARLPADLPAVVLGIGDASLGMGGCISGPGPPRQALLALLRTYCARRRVAAVLMDEHRTSITCSVGGARVEKLRGIYGLMQCPGCTVVAPRDDNAARNICALTLHELLPGGRGTAGGARLAGAFRQAAAAAAAGDQRMPMVGVGGGGARARRWQRRARAPRTRAARPRRRGAPRGAPAGPIPPAAGVETTGRRSHGGSEAGEHASRAEVEARARDRPVKERVERCAPRQRDARARRDGLSVASALARPRRAAMAQTECRAPPPSLGGAKVRIKLKLPPGGARRATPSGAPGPAPGGAGAGGVAQTLAELHTAVEAFCQQGVAGLPGGVLLSPWREPSPEPPPPAPQQAGPGPEPEPGRRRVRKRLAPGGGELGEPGGGEQLAWGSSKRQRSTRGRARDTAQLSNSVQSMLEPGAPAAPASPSVASELPPPAGAAGAPAAKQPSRGGSEGGGPPPQQLAAQARRSRLQQSSGQPAEPAPPPAQGAQGVEPGGAAGGADGAAARGPPAPRQQQQQQQQRRRAAAARAGAGPAAAPPAAAGAAAAAGAAESPPSEASHQQQLGAAAPQHLQQLLPGAAAASRGAAPAEPAAQVELAGGPQLAAEQPEQTAVSRDRSQCSLPRGPDTARGLDAVSMPAPPPAPPAPPAPAPLGGGGGGGAAAGGRLLELAPGAMTPVARALAVLSAVPPVRQRALPPDDRPVRSQEEALAYLGSLMDRAKQLKHQGDRRHNSLGAWDVFGLSHYALSTAEFLLAWDAALRLLARLRGAGAPVDRLAAHVAGLSGAQFLRQTGALSAMAMASCSNCRGPDVAKQALRMLLERLGAIANMRNLHNQRKQLEAHVRALKAGGGAAAGAAQAQARLQAQRAAAAAATAAAATAAAATAAAAAAAAGKPPSPGAWSAAGGQQAFNKSSPDDSNTSNQERVTLPPAEPAGGGAGAGGGGGGAAAPRAAGGAAERALALAKSERALMESMQELLRMTDGMHQTVMRVQQFLESPDVLGSEHARAAALHISVLGLDAGMFSLPRVAAHTEAAVMCITKLLRRA

SEQ ID NO: 4099 - protein, 1108 aa, Chrysaora achlyos
MSTHPEERKVLSDTPVVEYLISGKQVATVNIRLTCQGNRVSIACHVVPVTRPQAQPCSTGELMSTVQRSRHSVYAIKYHVVWIPKYRRRVLKDDVAKRLESILRGLASEKGWNVIELAIQPDHVHLFLETSPKIAPNEVVRICKGRSSRLLRKEFKHLRFFARTMWTPSFYIGSIGHVSAETVQRYIEAQSNEAQAAELARTFGCVRYVYNFGLALRRDAYEQGGATLKYKDTSAALTALKKGEETAWLREVSSVPLQQALRHLDKAFTGFFEKRTGYPAFKRKHARQSATYTRSAFRYVVEGGRPVLHLAKMKRPLKVRWSRTPPSDPSSVTVSRDAAGRYFVSLLCEVESESLPRLEKAVGIDLGLTDLIVTSDGFKSGNPRYLERDLKKLKKAQRWLSRKQKGSSRYAKQRRRVARLHARIRDKRQDYLHKLTTRLVRENQTIALESLNVAGMLKNGRLARHISGAAWSELVRQLEYKAVLYGRDVVRIDPWYPSSKTCSCCGEKAGEMPLSIRAWNCAACGAVHDRDVNAAKNILAAGLAAIARGGVGKTESHLSEATAPTSGECQGLITQLALRISAEIRAQSGAEFKLFLDRKDISWGQVWQERIEISLDSATFFFPVLTPSYFKSQYCLAEAIRFLERERQLGRSDLILPIYYIHTHKISTEASGVADQLLRHQYLDWRELRFEPLTAPEIRRRIAHAAADICKVIESQSPDLNEAKGRDALNDDEPVQRNGLSHARSTTVDEAKTHSVLSAAQDQIEEPLTITVGSSEPEQHSISIALKHASPGTRILIQPGIYYESLVINKSVELIGLGNEAKDVIIHATGRQPAISIKTNLCRISNLSFQQGGLQQPVAEISQGRASIENCDFSNGTAHGIIVANADPIIRNCKIHHCRGGGIIFEAQSRGTLEDSVVYENGLANIFVIDRSNPMIRRNTIHHGSQSGIYVYGHGQGLIENNDIYNNAHAGVATSEYGNPIVRQNRITQSQNYGGIYVFKRGRGTFEHNDLRATKSLPLLLNLQLSELGLGFSQFILKPGDLLIFGLNQRFGRFVGPVLLFAYHTNEPLQGSDNAYGQERECPIILWNNTLCGLPCGKTCYREPQSKE

SEQ ID NO: 4100 - protein, 1098 aa, Apophysomyces sp.
MSLPETLVVVPTENKVLLPSVVMKITMKGKEALAFTRKHYRQNDQRKTIPIACIPFTSSAVTEKLSNEGAQVAPSLEKHSVKDKKEDDGLLVRPDDKELLYDYGCAARIVRVQRSGLSVFTVFLEGVARFKVEKYTQDGLTLLAKVKYTERHSKEKLDEAKDEMIAFKALSKEFLSKIRDLQMPDTLIQQLSKLIDTVPSPVLADLLVSVIETSYEEKLFMLSTVDVKERLAKASEWLTRQLHVLKISEQIHSSIEGKLSKKQREFYLRQQLDAIKQELGETDELSGGKDEDEISQLNRRLSEANLPTEVAAVAQRELKRIKKLQPSSSEWSVTRNYLELIADLPWNKKSDEVLDIVRAKQQLEDDHFGLEHVKKRIIEYLSVAKIKGDLKAPIICFVGPPGVGKTSLGRSIASALSREFHRISLGGVRDEADMRGHRRTYVGAMPGLIIQGLRRSGVNNPLFLLDEIDKLAQSTHYGDPAAALLEVLDPEQNNSFSDHYLNVPFDLSTVLFIATANSIETIPEPLLDRMELIHLSGYTFEEKLHIAKSHLLPKQLNAHGLEPDQVSMADEVILKLAENYTRESGVRNLERTIASVVRSKCVELAELRESGKEAEYIPEVKVEDLEDILGIATFEKEVAEREPIPGVVTGLAYSGSGNGGILFIESTKMPGSGELQLTGSLGDVIKESAQIALTWVKSHAHTLKIAPSEHHNIVEKYDVHIHVPSGAVPKDGPSAGVTMVCSLVSLFSGYHVPPTTAMTGEVSLRGQVLPVGGIKEKVISAHRAGICKIILPYRNRKDVEADVPANVKDDIEFVFAKSIWDVLEAALIMNDTEKWTTRAFESHFVLGLIWGLLKGQAPSRIKTWIEATFSTCTDARSSVNVAVTCRDDVTPRPSEQQRKTKHYHNITTMTLPESKCDYLVGQIIALTQSQTFLSSREQVHVNAYHQVMPQCLRLYNERFCRLRLLNYIGRQRGTSEMIRAMTTGQLVVAKREWRSQKVERDDRIPLLGFGDGQFSQSLRGRPVGLSRAFHKILKLEERQGLPVIVSINEFRISRICSRCKSIHVEDIESVPGEKGTPLYAVLRYNHCRTVYQRNQNAS

SEQ ID NO: 4101 - protein, 229 aa, Apophysomyces sp.
MSGEPREFDGCVTQRGLKGLTQNACVWGVDPGVTDTFVVVDDGGADSHQIRKTSTIEYYNVCGYNSASRLRKKYMSEDADAKKTIDGISSLKSTDMKVLLGSVRCRLQNHVKITSFYRKDLWFNQLKWKTYVQKQNGTTEIAKQLVCGRPNRKLSDEPPVTHREAKEKWRCLDNRDRVTESRHPIITAFGNGAQSSSMKVKLPSPTRTIRKKALPVGKTDIGLDTSGYD

SEQ ID NO: 4102 - protein, 286 aa, Apophysomyces sp.
MSASNANFAPKPCPACGSTTLSSTRLGDCVAHSKSAQEILEDDLGKQMAFFARKCAVDSFVREAYRDLFCQIGKHLPRIQIESSLAKILTDGCAINLLFARKARDKLLSTELDLDDFNLHEVQMHFESWSLDPGLSQMFTGINGSGQTPYQVQRICSKEHYTMTGSTRRAKELQKEKDRSGITPTEMASSQQHNQYVACFLRHFATLSAFYKWMSILHPNGITHHGVLVCKCCHTLWNRDVNAAKNLNYIAKSVWRGQGRPTEFCPPTTNIAAPNVVSLLLQAAGI

SEQ ID NO: 4103 - protein, 449 aa, Apophysomyces sp.
MLFSFFDEDRINGVCAAYGLDFRHRVTITAQNIAILEGNVVRKCPVVSAYDEKRKKGRAKRNDSDLTLIFKGLTKDALATIEKRTAADKDIHSAKSKYKKAIDQGWRVNIGKIIREAKTRRSYAQKDLFRSKKLLAEKRSYRYELQKFIDMPQASQRKKRKKVKKREQNKMSIPTNNRLACEDSTESMDLTKLLAENADESIVFGGMDYGIKRPDVMKAEKSLLLNSFGNAKTPEDVLSCQKVRRGSCDVLRNFYHSTRFQHNSRIQQLRNDREYGLLTSIEREHVRKALSGPSTTIMCIGTGGMGNPSQIGAHSQRGGGNFEKKHRQYVPVCMTNEYRAFQVCVFCYQKTVHPKARRLVNGITKTISVNGTTKCRNPDCPAFKNEDATKNVDKQVVFAIALAGATHLLSSPRRVIPPFNSSQTNTSSFKLGKIAQPQQLSEHGNIRIT

SEQ ID NO: 4104 - protein, 562 aa, Apophysomyces sp.
MIVHFKDIENKRVLYETVLNLGTIYADGYDDAGREAYALCLDVDQKLFRDHGRFFFNGTIETDGYGLSVILQDQRTRAEGVIRRFYLLPEESPYIDEIGEDDFPDPERTMVCDPSRRDLLYMVHETSEPGLPLQLRYTQNQRQVESKLRTQRQRLVHEWTSEPQSNVPMTFNEYLRVRGANCQALSRFYGSTRYRKRRLRTYTNMRRSEDRLVNQFKHKIWRGCFPGDGQLGSAPYASFRRLFKKHGVPVFLINKAYTSSFCPACQGRAETFRSRSSPRPWRADETTRVHGLLRCQNQACRAAHGHTERSIWHRDLLACLNMISIVQAQRQHQQRPARFRCPPPAQLPQRLGGKRNKAAKNKCNSSQPKPLFLCHPYVTHMLVKGNFKAIVELPKYVDTNEWLAFNTFEFFNYINLFYGSITDFCVSLTCPTMSAGPGVEYTWSDTQSKKIKLPAPQYIDYTATSIENLLSDEDIFPTKAGRDFPRDLPIVVKKVFGQLFRLFAHIYHHHYDKVLSLHEEPHFNSLFAHFISFSREFDLLDKKETQPLQELIDIMIKNGVIV

SEQ ID NO: 4105 - protein, 248 aa, Apophysomyces sp.
MLDDLEVWGIEPGVTQVFVASNVCDPRAYISDNDTRYGSLVRWNTIAWLASQRQTPKSGNGKTCIVNHIQTKNHVSDRLLAFYGTDVQPLKLLNYRGRQKANDEMVKIFKNGGKRYGPHRDHGSDLEVFERQRKADGTLRWHSKNPATLCWRREVRQTSVSHQVARTLQDFSQGVQARCGSRGVEDMLVNEDDQSSKLHSVVCFEISKQSPFSLSMGSDLWVFTMDYEQKAEKQGRLPHPGTRSLLDE

SEQ ID NO: 4106 - protein, 802 aa, Apophysomyces sp.
MLKQKNQKKIEVANKKREAKRAALKEAQQEKSEEVICSTCDGVGHSRSSNKECPEHKPRRKVICELKLTSIIKTSLENTCKRPEFVATIRRVLNQDKPLPIISQDLCYSLFAIVADKGMHVDDNIRLAFQDFQRVVPSFDPAYFISRGYMTLIAEAAKQYEEGIRNHIVANFEKKTIQYLLIRFSDEKDKCYLGKTTVAARKALAQYVYNQVAGISAETNNWPSSVKRDKDLEKLISEIICALSFGPGPITVVELNATPHLYIPWMYIVLQRLEQKVFIQEEEPQDHVSNAYVHRKVHELIDTSNLSNKLIASLKDAVRSAIRRKIPLKLPKRFTKPLPNTEWAKLLDFVQSTVSAIENKTFRPLKYTDPRGEQQALGKLFCDSGTPIRLAVPSTKKVRRLYFDMFEMKKIGYRTIESLTIENSVFWDTIRTDGVDVEFIFKRPKRTASKTPLTPTDLQHLATDAIIWGVDPGVTDTFVAWRPKDNKDRDKKSERPILIAFGNGAISSSMKGKHPTSPRIIRNRLYQLCKQSKVHARVVMVDEYLTYQVCPKCNRRELKKKNERPDCRGQAGARLHAILQCGHRDRLWNRDVLDAKNILAVFKYMMANENKRSAFFRRLKKYNHFFAPWFCYSYIPGMYFYQPGISELPITHISPLAYMTSASGTVLAVPRQMVNRLMSSAVRSKQLPPGPPAQGAAPVPTIKWEYPSGPINSIEYDTQYYEHHVGLDARIIFLFVSEPYPHAIEFSSLCGHQTGTFTAPVRVQSSFATTNSKCYYQLQEKRRLWTSLTAPMETILEVDEEA

SEQ ID NO: 4107 - protein, 755 aa, Apophysomyces sp.
MAFLSSSAQQYEECIRNYVVASFRCKTIQYLFIVLSDEADERHDKLLIVQEREILAEHIYEGAAGESLVWPKAPPQAEELQSLTVRAIESISSYWGDKPVDNKTLNANPRVYIPWIFHILDRMEREVFVAEEKPQRYVSAAYVNRKVDEQLADTRALPNKLRTGLEVAVRQAIRKRSQLKLPKKIRLSKENENSLKECIKQTITAIGTDCFKPEKYTDPKGSRHFSILPVYSFQVRHIALNKQTFAYLLRLAGKPVNSYKPITPADLQHMLPDATVWGVDPGVTDIFVATDNAATEKHRLRRTSTKEYYDLCGYNRATQRRTQLLDSEPLTKTVVDKIPTVKTTNTDSLVSSITYRLQHHNQITEFYDREMRYAKLKFKTCTNKQQRLNEVAKRFFWGSRKYSKDSKQNCKKSCKSTQLSLNPNDQLEERSKPVIIAYGNAGFSGSMSGKIAGPTKKKILAEVKRLAGRRKSPTHVVMIDEYLTSQICPKCTTRKLENAHEKPTSDDCHGAKIHTRFTQAPLRLQSRFISQQGIRSKAAVGVFTWKSAVVFLGTGAGVLWYFQNEKSRVNKMLEEKKQKPQSYGKPKLGGPFQLTDAATGKTFGTEDLKGRFWLAYFGFTHCPDICPEELDKMAEAVDKIKADKALGELVPVFITCDPRRDTAEVVKEYVKDFHEDLIGLTGTQEEIKRVAKLFRVYVSSPPSSPDEEDYLVDHSIFFYLMDPEGKFLDCYSQNSTADEVVASFKNYHAEYLAQK

SEQ ID NO: 4108 - protein, 765 aa, Apophysomyces sp.
MLKQKNQKKIEVANKKREAKRAALKEAQQEKSEEVICSTCDGVGHSRSSNKECPEHKPRRKVICELKLTSIIKTSLENTCKRPEFVATIRRVLNQDKPLPIISQDLCYSLFAIVADKGMHVDDNIRLAFQDFQRVVPSFDPAYFISRGYMTLIAEAAKQYEEGIRNHIVANFEKKTIQYLLIRFSDEKDKCYLGKTTVAARKALAQYVYNQVAGISAETNNWPSSVKRDKDLEKLIKQKVFIQEEEPQDHVSNAYVHRKVHELIDTSNLSNKLIASLKDAVRSAIRSKNSLKLPKRFTKSLLNTEWAKLLDFTQSTVSAIENKTFHPLKYTDSRGEQQALGKLFCDSGTPIRLAVPSTKKVRRLYFDMFEMKKIGYRTMESLTIENSVFWDNIRTDGVDIEFIFQVSKTNCIQDTIDPNRLAVFGNYAIIWGVDPGVTDTFVAWRPKDNKDRDKKSERPILIAFGNGAISSSMKGKHPTSPRIIRNRLYQLCKQSKVHARVVMVDEYLTYQVCPKCNRRELKKKNERPDCRGQAGARLHAILQCGHRDRLWNRDVLDAKNILAVFKYMMANENKRSAFFRRLKKYNHFFAPWFCYSYIPGMYFYQPGISELPITHISPLAYMTSASGTVLAVPRQMVNRLMSSAVRSKQLPPGPPAQGAAPVPTIKWEYPSGPINSIEYDTQYYEHHVGLDARIIFLFVSEPYPHAIEFSSLCGHQTGTFTAPVRVQSSFATTNSKCYYQLQEKRRLWTSLTAPMETILEVDEEA

SEQ ID NO: 4109 - protein, 504 aa, Apophysomyces sp.
MSVKWLHYFCKNAEAYQDVPSVVDFLDAGGVECKDAEILVRQLPEAIQEEINEFVCRQRNDLEKILLKKIGDKITSSFQGHIVDLFDCLGATRTYQRPHRPLLRWTISCSGLKQSWYRYQYQATTVRKRGDCFTFVFDVATKVVTGGKQSSIVKKVNRCYKTKLHKRIPGTELPRYATKSRFLTDGLRLVAIYTDWCRSSFQQQRKVFLPEVRTLARRLREQQDNKPDSDLINYSGVVDLDLGETCAAASFYLPFDSERPGVQLTIKRNELYGRNGMNAAWLEDRKSKCGIDEDEAVLACGSQNSSLNKLLVYIRAWQYGDRGIRLRNFYANKSIMRRSWDTSLSLSSSLDKACNLVMKSTRKNVQLGKNNPSSKNRQKPVVFGFGMDGLRSGSRRGAPSSMDRRLMDRLRRHVRASDSDHKVCQVDEYCTSKVCCKCVQNGKVFFTKYLRRLSEEKDQEVIRILVCDVCEGVFRRGGNAAHNIASIASSIFMHHRRPAYFIRP

SEQ ID NO: 4110 - protein, 1014 aa, Apophysomyces sp.
MTPQGSKAAAPARKRGANDGRRSQTTKQNADERAAKRQARDDRKAQVDADRETPHKHCPTCIKASQVAVLKVTLASNEEERQRHRAEEQCCITKSRTHSRASNKDCTGYKERQAIKTKARLGGKVRPSTIKHGLAGLLQILPVAEQAQFLQGVETVVDYNRKLAIQAHLFLTYYLTYRLDAGLPIMPAFFDMHFVNGIFQLLLGGRFTSRAIFSQAIRDDLDTAFARYIEMFPNARCQKVPSPAARPPIAFSGLLASTATQIASTFTSHVDLKRGQAKAYAQYAYQASANDPQFPPEWPTLYHSGAIDDVLNDALQTAMDEATDEWAAIHDQIQQDRRRRQDQGRTRSSSVASTSTDPLPESMEAPSPAVSISTIGSMGASQLDISADSFSVETSTLTAYPQLFLPVLFRILQVMENWNVADQELPATPQPEATPVWTRHWLQSLPAWESLKHRRRTSLVRAITKLVNDQVLFDPARLPVGFDQASIDTMTEFIHQAQQELAEGTFTPPTYLVRSQARLFTIAPVAAFTRKYVKIDHETLGIILRHFGLGQHTAMPHTPVPADRPHANFNIIDLSKMKASENSLSTDGFATSITFKKAVPENPLPSLALDDIKEEHLAQCKIWGVDLGVSEIFVAVDGSDAGTYEDPSTAANAPHQVLKFSAAEYFTKAGMKKTNASILEWKRADGITAIEAALPSPKSARMSNIEDHIRAVLQALPRLLSHYGARYQQLRFHSYRGKQKIQKEMVDIFLTGGAKYNGDHHNVSEAVALSRTRADGQMRSKRKARPHIIAQAAAPKPNKWQKAMFQETHRDICNVVCVGDGAFGRRTFRGKVSGQANMSTKHTRPKCAAAAVSGIWTMLKSMSNPNCTPSYYATTVDACGSAIVTQRATSMPWHSWPSSPATTLKAGLKSSPENKDKKQSGSQKPATVKRLRYLRIQQRNGRKTLTTLQGLSQDVDIKRLLKAVKKSFACNGTAVDDPEHGEILQLQGDQRLKLAEFLVVEGIAKKADIKVHGF

SEQ ID NO: 4111 - protein, 492 aa, Chlamydomonas sp.
MRTQNATVALNLLVRQLFDGCADPRIPEFWDTTFVRQLLLGTGGTIKPVAEITQLFKDNPHLAPIEGRSFADGNIYTYAAKKLATNISNHLVTNLSKVVKRYLYDGAGLTTADAVQAQFLIYGWDLTKKKKKEKKNEVVDEEAVKRVVADVRKQLGLADDQKIGTMWYKSKPNLAPMLRMFVFANRALERAGKKLFNILPICRFKAHFITIDKTSVVGILNDADFGRGEKVTLEKLDWRAFLGADKLAGKNCTFTTTIDTDGLAINVHFTRPKNEGHSSEVEKPSLEGKRVLACDPGRSNIMYVVEKLDDGRFEPHKLTRRQYYAESGIFKANENSARWNKGVVNELKKLSTASPKSVDLGAFSLYVDAIASVRDALWEEYLCKRWREQTFRMYGGKKRSFAKFFNGLKLTPNTVLAYGASKFASGGKGELSVPVSRAYKECRARVRTFNVCEFRTTAVHWRDDTVIQTVVKSSGDGGRPVPPSTGRGSSEN

SEQ ID NO: 4112 - protein, 648 aa, Chlamydomonas sp.
MSETVVKCSLKRLLIAPPDIKEAIVKAVEKRVVQCSIRTQNATVALNLLVRQLFDGCADPLIPEFWDTTFVRQLLLGTDGAHKPVAEITQLFKDNPLLAPIEERSLADSNIYTYAAKKLATNISNHLVINIQKVVKRYLYDGAGLTTAGAVQAQFLIYGWDLTKKKKEKKNEVVDEEAVKRVVANVRKQLGLADDQKIGTMWYKSKPNLAPMLRMFVFANRALERAGKKLFNILPICRFKAHFITIDKTSVVGILNDAKFGRGEKVTLEKLDWRAFLGADKLAGKNCTFTTTIDTDGLAINVHFTRPKNEGHSSEVEKPSLEGKRVLACDPGRSNIMYVVEKLDDGRFEPHKLTRRQYYAESGIFKANENSARWNKGVVDELEKLSTASPKSVDLGAFSLYVDAIASVRDALWEEYLRKRWREQTFRLYGGKKRSFAKFFNGLKLTPDTVLAYGASKFASGGKGELSVPVSRAYKECRARVRTFNVCEFRTTAVHWRDDTVLQTVVKSSGDGGRPVPGVRRTRGGSLIPASGPRRSVRPGARPGMFTYDDVRLAPAPRGGGARAYFATFDHFDGREMRLSIDQRLVRDAVDGRIGTLLTNDTFYAIKGVRDGGDSSAVVVLGDAVAAAHTVRPVGLVGAINSTLIAIA

SEQ ID NO: 4113 - protein, 237 aa, Chlamydomonas sp.
MSFVPISSMTLMKLLSMGDKPLERIRGDGREEDHSKLWRKYFNIGGVETRALRFDDRILSDGKVRWRRPGHDRHRHHGVLHRGVKSYSSSHFSDAAGYKTSKRRTDKWNAETADLVRSIPPPTTSSVEGMHHHVRGYLAALPTLLQHRASKGYRSMRFLRFVGKQKAIEKVCDVIAPKGMTTVVGFGNWSNQGSGIRRTCSGPLKEIRKRLSRRTNVLFKNVDERNTSCTWLLPQAR

SEQ ID NO: 4114 - protein, 329 aa, Chlamydomonas sp.
MDVADYPKDVSIDECLHATTHRDAQNAGVDSGMTDIVTVAFSTGGVKSYSSSHFSDAAGYKTSKRRTDKWNAETADPVRSIPPPTSSVEGMHNHVRGYLAALPTLLQHRASKGYRSMRFLRFVGKQKAIEKVCDVIAPKGMTTVVGFGNWSNQGSGISRPCSRPLKEIRKRLSRRTNVLFKNVDERNTSCTCHGCFHKLVNMKADSVRWRKAVPGGDGSLADASAESTARVKTVVKNVKVHKVLRCSNSVKSAPNVRCGTTWNRDANAAKNLLLLLKTWMEGRERPAVFCVPSNNTVSQEANVRTRPIDPTSGSFGSARSLSLGPAFGS

SEQ ID NO: 4115 - protein, 425 aa, Thamnidium elegans
MKGKGKDVDNRQTDDFHLPSSKKLKRRFRGTKSKSANLEKFTRYIKTRATVSSTLYGYYGNESQKPTEVYFPGSSFEFRVDKKCNLYYGSLFVAKMRGVLPQPERESDTRSFKREVYYNYLQIMLQQPHITKRLEEEQKNKIFELAQQDNYVQKISVILENLQLLPFQKLKFFSKLFYYQDDNKLVHNLRGKFGQDAILVFGDWSAPNTKFHKPTRNKNLIAMLKKNGFTVYLVNEYKTSSFCPGCEHALEIFKTVPNPRPFKRAKMPKVTYHGLLSSFESDQPSFGLPRKKFISEESFAKEMAAMSLEPIVDPNRFPEARASNTYYNLSDEEEEENDSIMTLDSNGKPIINVDRNGLPMEIRPGENKPRIPDFVLKNSELTDPRDILAYQRIVQSLQNKPHKHKEIEVLNKPSDYFIPTSMDID

SEQ ID NO: 4116 - protein, 368 aa, Mucor plumbeus
MTMNPDHVAKVAKEFCYQMVCQGNPVWPKSIQLSEGEQSRIKEVCMPLSTHIDVQVTLKSLSASPGKFVRSFAYILSEYEREHLAHNPYDVRRLSLPRLFTISPSPSFRWEFVTISINSLCCFTKEKLPRGYNAQLDLFYKYFDFKGLGFKSIDDLRPNGLNNVLFSNTIKSDGFTVDFLFEKRRATALKKVKKDIENHDLVLEDFEYEKVERIYQPVFIDPGRKAVYTAAIGLDTNRKARAKKKINDSDVSGTVGTHDVTKSNKWKPSKFEYDRSKVPLIVFGTGMVGKDSVKLIVVPIDEFKTSRICNICKTDTLYKASHTRGFGVLVCKTCKTLWQRDVNASKNMMSIASSIWNQDGRPTAFKRI

SEQ ID NO: 4117 - protein, 264 aa, Mucor saturninus
MFLNGLYTDDYTCRVLFARKVLPSPPEENIRLELDDLSSEEVNKHFRSCTVDPGRRDPFVSYHGGSDIRRLSSSEYYNMGGNVTRMKEQQKHKHRLGIEKLKQTFLRLKLRLWSNLFSGFEVGNNSKMPLVVFGDGLKNKDLVKFKGLRHGISNKIYIQLNIREKIVDINEFKTSKICNCRLQPNLENLKVSQDDHTRKIHQVLKCITCNIYWNRDVMASKNMITIAHSIWNGNDRPTVFKRQTATSNVIASAHSRNLLKLSEN

SEQ ID NO: 4118 - protein, 887 aa, Bradysia odoriphaga
MKMQRYNDNLVMLRSFKVSLKKSGHKTPRIELTEIGITDEIPFAKKFNVVANDSPPKLRNVAAVGRRKNDNPKKPPVSSNDNDNSPPKRPNVAAVGRRKNDSPKKPPVSSNGNDSDDDFVATKKVYNSPPKLRNVAAVGRRKNDNPKKPPISSGALNAAILKAMPKERTSSTTSPAVTVDITSHRNTTSNIIGSGRKGNTQEVSNPLPIRQSTPTMEYGSEWDTDGEATIAQLKQMERKRQSKKAHSTSTKPEVKQTPVQSNRKRAASTDADEATTKRSTATKTQQDSADEAGDADEATTKRFDVTTVKQKLRPLIIDGETKINKQRVPDRLATEKTEVATKVFDIMNEQAVELSKLAILFSSLVYFDVYKTISDGENGNEIDRIFEKEFNWKDNSFHTMHFPIDTKALFDILKTLPQFKAILNQAEFLELQIDDDPNRKTTNPFWYFLFNIRKMETATKKFGGRITTNGSDVSIQYCKLRKEKELTKAEILEMASNRKRKHEVIDSDSESESEDDDDDDAKTEKTDPAIVSALKNITNMEDLSVSGVDLGIRNIAATVIRKWRNSSDGYEVHESNVLHKSKDYHYKAGFARRQRKSKKLHGEFDERYQRDRQSQPEEPSQRSPDFMKFLDSRLKWFNEGTATYMQRVVTNVKFDKFRSTQKQMTAMAKEIVGDENVHGKATTQQSKVRVVFVGNCSTPSNSSIKGHRRSPGNAPIVRYLKQIPRTFVDATIDEYCTTKKCSRCYETLDDVEFSKERLKLCHNCKLSENSTSTNLVSTYQRKRQIAKAMVPITRIYPKPTQFQRAQRLKMERTKRWSFGDKIRIAARNERKSTFYKVNTTATLNKLYWNRDGNAARNIVQLGLCDYNDCLPIEFTRDEAFQRPKKNN

SEQ ID NO: 4119 - protein, 235 aa, Bradysia odoriphaga
MEGSNRSWNFIAYTQFELKHLFDLQKTLLSPTLAHHKLKRSIFMEKTAVNIASQMAETGGIVRNKKVAYTEADKRKNRTEMDRRAKSSAHQLGKKSTLVIMGDFKLASDSPMKGHPRSAHTKFRPYLEKRCDVLTLNVYNTTKCCAICFKKSEIAKPPERFGQCLCNGNKRKVWHRDINADVNIRMLSERHLKGKQRPVQFTQKGKLKKQPHKLRRHQPETFKTHGGGGDQFIVI

SEQ ID NO: 4120 - protein, 482 aa, Bradysia odoriphaga
MTTITVVRRPSEFHQYSTTDQQRSKASSTAIISAAQLATAIGNANNSKKRATSPISQGSNEQQAEPKRRKVGIRFTAKKNPTLSYINEAYDSDIELFEDYLSMAIKSQFEAVSIGRNVDFIDNLTDSFRTLLEQSGIDRPSRSYLNNAFKKLYQRYEDTFRTNIKTHGKKRVQLLFRLWFVEEYDRNPTKQETKQMAAAANFIFNSRSKSSRTNVMVDQLVNRFMDYLPSTIPDDLNDQSKGFMQHLLWKNSWFRMYHNMARQNIRDRKCKKWTETFENKCKTEREQFNQQYQAVLSPRSRTYPSYIGHRLRHLDEAMEIYTMRKYTRTSFDKYKRAQSAMDRIVNDLVTTSVNSTQRCLFAVGGSEFPSNSPIKKYRRCPGVRKLVSALKKRPNCDVVFVDEYNTSQACARLFSVNLGRQTKKSSSTRDGNEKGIVIEIAQIAFRHRNFYRCQLRFKRKNHLRRFGSKCLNKRTAFSQSST

SEQ ID NO: 4121 - protein, 462 aa, Bradysia odoriphaga
MARKRKFEAATDSEESHSDDDTPSSGYTYSSHFDSKKPKTLRKDAKESEFTSVQQQDDIVDSDPEPQHICQTHIELVEIGISKNQPIVYKPERGNNWIGRSPDSQLIADSNFVSRKNHACLVFQPFVNKLHLKDCDSTNGIYVNDEMVSVVELNEGDLIGIGCSTDHHSINNPECVVLRVTQKVIHYPNEQSTKRPQPVEPITLSSSSEDELEAPINRTSTATQAYMHRQVTNLQFAKYRSTQTAMTQMAREIVGEVDVVGHKLEEKSCRIVFMGNCSTPANSTIRGHRRAPTGKKLSRYLQQRRNVIIISTPETNSTKNCSRCYEPLDNVESSKERLKICTKFCTPARDSMPAHHITTYTSKRSIKRKMKKVGTKPSQSERKSRVSMNRIDRWSIDDKIRIAKRLTLKRTIYVGPIPARHNILWNRDINAARNIGYLGLCRYGKFIDSSLNTTENTGVLTK

SEQ ID NO: 4122 - protein, 975 aa, Bradysia odoriphaga
MEYGSEWDTNGEATIAQLKQMERKRQSKKAHSTSTKPEVKQTPVQSNRKRAASTDEASDADEATTKRSKASKRSKATKTQQDSADEASDADEATTKRSKTKKAQQRKDDDENGCRAVIKTHLEEKSFLGNVFDKSIRRFTCPFTPCEANYSSFNNLKNHVKEDHDENLQKPIETDTNNWRRIQNSNNRFDVTTVKQKLRPLIIDGETKINKQRVPEPLATEKTEVATKVFDIMNEQAVELSKLAILFSSLVYFDVYKTMSDEQNGNEIDRIFEKEFNWKEMLLEFKTFQRNTAKAKNTRPDKHNTFFDLCRSYDVQTNFVETSQNAWNTIADTFATNFKTNITTHLYSRIRKWFAFKLRNGKKKKEVCGKENRKLINDKVYHTIKFLFDSEKCTQAEQVQHELISELQKICQFPNFNNGRKSYFERLRYDFKEDGDDDSGKPKRKRKCAARKTTTKKSKIKKKKTQNNGPRLHWFQMVPAMNSFHTMHFPIDTKALFDILKTLPQFKAILTQAEFLELQIDDDPNRKTTNPFWYFLFNIRKMETATKKFGGRITTNGSDVSIQYCKLRKEKELTKAEILEMASNRKRKHEVIDSDSESESEDDDDDDAKTKKTDPAIVSALNNITNMEDLSVSGVDLGIRNIAATIIRKWRESSDDGYEVHESNVLHKSKDYHYEAEFARRQRISKKLHGEFDERYQKDRQSQPEEPSQRSPDFMKFLTSRLKWFDEGTATYMQRVVTNVKFDKFRSTQKQMTAMAKEIVGDVNAHGKATTQQRKVRVVFVGNCSTPSNSSIKGHRRSPGNAPIVRYLKQIPRTFVDATIDEYCTTKKCSRCYETLDDVEFSKERLKLCHNCKLSENSTSTNLVSTYQRKRQIAKAMVPITRIYPKPTQFQRAQRMEMERTKRWSIGDKIRIAARNERKSTSYNVNTTATLNKLYWNRDGNAARNIVQLGLCEYNDCLPIEFNRDEAFQRPKRNQ

SEQ ID NO: 4123 - protein, 488 aa, Bradysia odoriphaga
MNRSSCLADRPLIQHHVYNYNMTHAEEWRQEDEKTKAACKTGKIKQKYPRIRPMNIVPIMKFRRQHVRIDSEGMFHVFFVLKQLPKKTDNNRRNITVVEFKARQHEFWSRFLNMERIEEICRGTKNKKEFAFQIQTDGVSVSLLYNAVPKRSVNAEAKIDRIRNNYRNNQYRYETSIDVWYNTYIAAIVDSGKELNVTLKSRRFHRTTKNNLRKKKFVRLAGDFEKAAALDRENRQLYPEMPTPTGSHMWWLYIRHSLKHWSRAIETYTVTAYAEMAFDKYTNTQKQIDGIVKLLTNGGEPTLLLIGGKKMDTFALCIHNYTLDNMNNKIIETVMGFMETRCKIVRGKESKLSKETRDLIAKRVELIKSGKRDSVEYRDITKIINKEMRSDLRKYNVKLAQETIEANCNMRVLRSKLMNAKKEIFKLRDKTGTIQSDRNAILNIAKEFYEDLFSSVRPKPTTTTEENQPERPIITNVGSEELPDITVT

SEQ ID NO: 4124 - protein, 1392 aa, Bradysia odoriphaga
MARANVNDHSTKTIVGIQSAPPLNVGNISAASLKGARHENRTIASMTMGEVGNISLSDSDSDFESRSKRKKQSQPTTASSKDPRKGIGGMARANVNAPPFNVGNISAASLKGARHENRTIASMTMGEVGNISLSDSDSDFESRSKRKKQSQPTTASSKDPRKGIGGMARANVNEKSHFPLGLPPAAWPPLNSKINSKKTIGKRSTKEQLSPVRKYHRIEPNSELDVAISNEDVESLDANITVSDIALLYSMEYIRSKYAEVTNVQTVPPSIGDTLRLLDYDEWPSFLGNYTLNSQSTLLFPLTDSTIRNVSSSSTHWYLVTFFRGEARYYDSQNRFGNTITYNLHEFVGKLSEFMSQDGDAALKPKLVDCICSRQTNATSCGLYVLMYMEQILQCFSNGTDWGNLSEFSEEAVNSKRIEWQNNLIEKFEKSKIVRVPPRSDQPMQPNVPMGNTPSLKWNVTKDDLKLLKNGGWLTDSIVNAAFEQMLIESANTSIGFVPVAVSAILRTTPRHQWREMLANVNNKHMVLFPIVHTSASAVGGSHIYLIAYWRSKCWYFDSRRNNYDRKHLSDINEFSENITRFMCGSGNMEIVQCSKQSNSNDCGVFTILNGKALVQHHASQSTTISITSSITSEQTIAERERLYKWLSTINETSSDMPESQRVVVNTPKSAKRKSQGTTKAARTKPVTTTTMFKRQKGVRPENQKSQECFTSVKMKLASILRDGSNGVAQLISSMSIKATKIASLASLLLLAKVNDNIDDRNFFEKDARDVVEDCFFEVLNPIKSRQGRRREPKFPEYISQRFAQTMRTHRIVRPDNNDMGNMFRYMHQMYSTNFKTNICEHGWKRIHNFFKIVPGSTKKKRRDTMNYLFNKTSKCQDDETLIAALDNLPNQPFHNWRRGALEKFQENWFAYVPLFVAIQRRNYEYNMQHAEEWRLENEELKAARNKEKLKRKYPRVRPMNIVPIVKFRRQHVRIDSEGLFHIFAALKQLPKQSDHIRLNINSVEFKRREHELWSRHFNMERIEEICRSTPNKQQFSYQIQSDGVSVSILYNAVPKQKANVGAKINRIRNNYLQNQYNYETSIDVGFNTYIAAIRRTISTGKEVNTTLKSKRFHRNTKNNLRKKKFVRLAGDFERTAARDRENRQLYAEIPTPCGREYWQYIAHSMKYWQDALNTYTIRQYAKMAFDKFTNTQKQIDSILRRLTNGKPTLFFIGGAEFSPNSIIKGHVRCPSIRKLTRAVARYQKSDCVFVDEYNTSQHCGLCLTKFEKHTKAYRFKKCRHCGTSKQEIPKAPTIVTRESKRNRQQHRQRTNAPAHRSRRFVSDSLIPTTQTTWQRDICACRLINYKGLNALFNRTIDQRLMRVTRSQSDSDENSSNDEEIPTHHGTSTIIW

SEQ ID NO: 4125 - protein, 1112 aa, Bradysia odoriphaga
MLMDIHCESDAEIDTCDEKKRAKRRIVTSSTSSPSRGNKSANLSTASPDGSSRAHSTLAGVEQMPVSSTSISNRTGGATSSKLVAAGAPVADPIRNILSYHGVTVSQTDMESLQPRQFITDKIIGFYFEYLQQEVYKGHHKILFLDPVVVQHLKISADAEQEIKHLDPQSKDFIFLPVNNSEHENDAGTHWLLLVFSRIDKKCFILDSTNNEEVLAKIYTLYERFKLLLEMDDAGFENYRALQQKNGYDCGLHVICNAENIAGHVNAFNKCRSMPKSVPQQIATKRKEIEEIILAKASSNTKTSSTPATRQTSLGNFFAKKNSKEQPVPVQSSKESKLDVIEADKADVIAKRQRVLASKFPSELTEAAAKSKSKKSLKLNPFGLELPSTLKRKRKNVKLKSTRKKKQSPSSDDNGQQTADAQQHEKKKKKSKPVKTPDINYKSNRWKRYEKDRRTSDNYYNWKTGIKESGPPKDVFLFESRKTMPQLKGYKPPKKLFQRKGPKPPRQGDKYDPKTEELFTVVLTLPKLLHNTESDAEWRKEVVLSQMQALVVELSKLSIEASYMIYHQYREAFDVEPYLQITQKPDFRGFFASLNKTAKGYNCDNIRRMAESYFTLRQQYGINGGRYYDGRNRTGSINMAADLYETSLKNNIIKHTYSRIRNFFKVVAPKTRSYATLAHLFYSDGGDCIPDKNLLQQLENVLGHTEDFRQLSSHWWKYIPVLLRLQRWRGLNNLKNFKVFPILGNRRHHVHIDSQALQQFLNGIHQLRYEDFQRESDQYWRRIFNVAKLETTNIIEGVDYGHKFNQYISTNGVSVSVSMKRRKRISTMCDDKFLQNVRNDLHNGEFDHIVALDPGARLSFAGIRRDCTTNQETSIRYSSSSYRYDSGQYNINAKYRAITNSVLKKVQTLRKNQPDKASSMANAVTFVQFNLSIFEELNQVMLSKTLAKLGFRRYVCRQKAISKLAQQLAFGTEKCNEIRSLRADRKKARRKKRDTTSGPIATPKALVFVGSTKISPIIKGYVKSPNNRIIKEVSQLATVVNVLEHRSTMLCSRCFLPCITARSPHRWQYCRTCTIKWNRDVNAGRNIMYLGLHKIANTDPDQGFSYGYQFPK

SEQ ID NO: 4126 - protein, 306 aa, Bradysia odoriphaga
RTYGVNSAYRYDSHQYAINRKYRQFTKQHAEQIQTARNQVQNKASCTADPTTYINFELEHFEANCNVLLHKHLAKLNFDRFVWRQRSTARLGRELAYGQRSITELEHHERRERNRKWRYRKKRQKQIEIDPNVPPDKYVKLKDRPTPPRVLLFVGDTDISPFIKGYVKSPNRRIIKETSKFATVVQVNEFRYTMLCSRCTQPCITARSPHRWQHCKTCMVKWHRDINASHNIMYLGIHRVNGTNPDQRFSKSFKFAKPARGYLTRSKKPKLHTRRDPLAMGRQKRQELRLQNNISPGSHPPNVKCP

SEQ ID NO: 4127 - protein, 295 aa, Bradysia odoriphaga
MGNCSTPANSTIRGHRRAPAPTGKKLSRYLQQRRNVIIISTPETNSTKNCSRCYEPLDNVESSKERLKICTKFCTPARDSMPAHHITTYTSKRSIKRKMKKVGTKPSQSERKSRVSMNRIDRWSIDDKIRIAKRLTLKRTIYVGPIPARHNILWNRDINAARNIGYLGLCRYGKFIDSSLNTTENTAFSRTMKKVKKMKKLPESHRTRTVSEDYVHTYDGETYTVPTYVTKSSSKNPYLQMGLKDYKHFEETVLMELEEKEEKKVEATMGSLLHKKAKNTEEDLVQGVPVDGWRP

SEQ ID NO: 4128 - protein, 375 aa, Bradysia odoriphaga
MALQQFLNSISRVKYETVKQSKTAENNLWRHLFNVDKWLPAHEDNNRPDDYRGPRFHKSFRTDGVTVHLTMVRRKKPLPDEEQFLSNISDRLASNHFDEIVALDPGGRLSFAGIRRDARTDAETTIKYSSSAYRYDSHQSAINRKYRQLNQIQTARNQVQNKASCTADPTTYINFELEHFEANCNVLLNKHLAKLNFDRFVWRQRSTARLGRELAYGQRYITELEHHKRRERNRKWRYRKKRQKQIEIDPNVPPDKYVKLKDRPTPPRVLLFVGDTDISPFIKGYVKSSNRRIIKETSKFATVVQVNEFRSTMLCSRCTQPCITARSPHRWQHCKTCLVKWHRDINASRNIMYLGIHRVNGTNPDQRFSKSFKFA

SEQ ID NO: 4129 - protein, 463 aa, Bradysia odoriphaga
MKHIQIDSYTLRLLLQGLDINPKKWNAKRTKKIGLTAKEFKENERECWLAYLNEKTLKRLERNGKKFKCSISTDGVAVSIQFESDKDPRPETFEKLKSKQQRKYKQFKNRYENGEYTRMIRLDPGYKFFLGGVVRDNRANEERLVKLSSRKYHNMTRQNIRDRKSENWTKEFEQTCRKERESHRLTHQSVMSPQSRTYLLYISHRLQHFNVGIELYTMKKYTRLQFDKYKRAQSTMDNIVNDLVVPVTSGERNLFAVGGTEFPSNSPIKKYRRCPGVRKLVDAVKKRPNCDVVFVDEYNTSQACARCFRKFKTTDQEIEQHKRWERKGHHHRNCSNCIPSSEFLPLPITIQTKESPETIRIKMLEQTHSVFTKFNVTYDEAKKHTQQVYYRYGEQLYDKTIEKQQQATYNSHQRSTALKCVWNRDVSAGRNILIKAICLISKLPCPINLQRPQTNNDSSDEGD

SEQ ID NO: 4130 - protein, 308 aa, Bradysia odoriphaga
MGRGVVRDEPTNEERLIKLSSRKYHNLTQQNICDRKAKRWTAEFEQRCRDEREEYLKTTHQVLSPTSTSYPDYILHRLRHLDEALSLYTTKKYTRLALDKYIRSQSTMDDIVNDMVVSPKTGKRNVIIVGGTEFPSNSRSKNPGIRKVMTTIKKRPNCGVISVDEYCTSQVCGRCFRSLKSTESDRKRHKKWEWKGHRLRICTDCKQNEQLLPLSSTIETKQSVSHIQVDVLQRTQRTFTKFNISAEEAALKETTIIVRNGPIDAAQMCLEQGCCSRTKYPDQGHLRDPKHAATDHVAATEKKKSGRS

SEQ ID NO: 4131 - protein, 212 aa, Bradysia odoriphaga
MSSNSRTYPAYILHRRLQHLEEAIALYTTRNYTRLAFDKYKRTQSAIDCTINDMVVAENRGDRNPFVIGGTRFSSNSPIKKYRRCPGIRKIVTAVKKRSNCDVFFVDEYNTSQVCGKCFRRFKSTPEETIMYMHWERQGQRLRKCSGRSPSEQYLSLPLTKESAHCVQIDVLKHALQLFTSTDMTYEEAKEETLKIYYTNGDNYYANGDRRT

SEQ ID NO: 4132 - protein, 210 aa, Euura lappo
MLRDSDIFQGQGGRQPRLVERQRFRDPPSPVGEDGERKGSCSKDRHQEARVGTSGSFEAIDELHAQAGRETKALRRRRENPNPAKERFRLSSFLGQFKIPKGTKGSPGTPLTKLLKRFNDRAHRGQKDIHIVIADEFRTTMNCSQCNRKCTKISTGRDRYLYCAPCGITWNRDVNAGQNILNLGLVRNGLVPDGYMPDAENFSRSRRVAR

SEQ ID NO: 4133 - protein, 454 aa, Euura lappo
MKVGAKHIRYNTRAVSELRRRVFGASETDLEDDETDPEDAEKKVWNTCFKVPNKFANAFAGSMSTNGVDVSLSCGRPPRDAADGNAEKRRKKSDGTADIRDGETDFVGVGRYPRPLEDYNRVAGFDPGLKYLAGEYEREKRRKRITGKVDVQAQDKLQKDFPDLNTKDPRNYSIITEYRLRDLEIRQPVYEKRCVTRLGWQKKMRVCKAVDDMVNYWVTGKLKNMKKIDSKREKAKKKHVEPKKRRRKRKKEEEEEKDRTMRALHESVGALSMDEDEDEDMIEVTKPKESTSRALHHEKDVDIIFVDEFRTTILCSQCNNSCVTSRSPDRYQFCKKCGITWNRDINAGRNILQLGLHRNGLVGDDYLPQPDNFTWQKRLATVEGLLSAAYRSSSLDQVDGYVVQIWLGFRLHPLLQQPTIFMAETEFQENRGFDQKAGKYFNVLDNGVESGLFL

SEQ ID NO: 4134 - protein, 981 aa, Euura lappo
MGRRKNTKDHDHPENPKGKKQPPPKIKVCAFCQKVGHTSRFSKQCGRSYRKQPSGAEPVPGTSTDSGTLAKDVVQCASCSKYGHKRASSKACDNYQPRAAEQSTGLATKDRQTYSIKCGFGRVCKNDVVFRLVNEDVRVISRFLIESSYLIEYCVRDPKRWLVGEWKTMDAQPDIRVMMMHLTRGYTPNANKRPGRQFYSLFAEYIAMRDVHSGGPLYENIHRGPLYDQACAEFTRNFATNVTTHAGVRVRNYLIKIAGMPRTDAYDSVDALFNTNARPVIIDEGNPFNDFDDLDFTEIDTKWWKFVGFYQRLQQRMLEPATEEVQQRDTERRAAAEERRLARAERARAREAENPRKGKSLAKAKKKKKPKVPAAEPQTWGKGFVLVPIYNVGAKHLLYDTGAVQKLLIRAEDESDGQHPFSESPEPVNRNPGAYSKDPLVLWKKCFQIPEKLIRDKKFACSVSTNGVDVSIHCARPKPDDEEDATPSKRRKLSTTGKAKTGEFDRRHPLRDHASDYTRMVGIDPGKKIACGGVIRTSDEDTDAVDKRAKNNQQRICLSTAAFRFNSGFYKREKQRVKLTGTVDLARQNLLATERFVGLNTKDPDRYAIVTEYRLRQFKLCQATYEKRSVTRLHWQKKWRTQQTTDRLVNYLSTGEDTQKQKGHARKRRRRRKKPADEQEEDPAMTLVEALAGNMSIDEDSDDGTSGAKAKADDNHDSSSDSDFEIRRPQSAKTGRGKGPAAKTVTRKPELALPGPSKPSTSFTPKPAERRKAKVVVVDNDYDFSSDSDFEIRRPKSAKTGRGKGPAAKTVTKKPAELALPGPSKPSTSFTPKPAERRKATMSSTPSTKRKSESGQGKVQTLVVLGQFKIPKGTKGSPGAPLTKLLKRFNDRAHRGQKDIHIVIADEFRTTMNCSQCNRKCTKISTGRDRYLYCAPCGITWNRDVNAGQNILNLGLVRNGLVPDGYMPDAENFSRSRRVAR

SEQ ID NO: 4135 - protein, 911 aa, Euura lappo
MPKKKPPPQKPEGEPPPPTQKLPRVRKKKLSAAEKAKLQCPTCKEFGHEDRSWKECSKHEAKCSSCGAWGHSRSTSKNCKFHTQRVKALLLGTECTETYAIKTGFRHVCTNDAFFDAVNEDVLEVTRFLIETSYFIEFCLRHKNRWLLQKWIESDTAPSLYTFAAHLAADSKPPADETFAAMLAQYRQLRGTDVPWYKTSKRTRLLDQNLVTLATNFATNVTTHARTRVRKYLQQMVGKSYDEAKKATEDLFATNTRPENIADELFDWDRLTQGLNFPEIDNEWWKFLDFYQELQKRMVKERTPAGVAKFEAARANAASYSSKSSGNGKTPANGKRAFKGRQALTSGKVQSASSAVDEASTSSAGLPAPETSEPRTQASAKGFVLFPIKSVGAGHIRYATDAVRQLCERVLHLTSGQLQKQLDKILEEKGEEKNTGNISKEIWNMCFKAPPNVAKAFAGSMSTNGVDISWSCGRPPRSDQIAGHATKKRKTNAGGAVTDDLQDRFVGVSKDVKMEDYDRIIGFDPGLKAAFGGIIVKNNQRGKDAEQRVCYRSSEFRYITGEFERAKRRKRVTDEVDKLNAELLQRDFPDLNTKNPDDYVNITNYRLRHFQLCQPIYEKRCITRLSWQKKMHVRKAVDDLVNYWVDGDLKREKKIEAQTEKKSKKKAPKTRRRKREKIRLGKMRKQTGKKPAIKKTTDKHPKVECGTSGMDVEMLQDLYDSVGSMSLDEDDGEVDMVEPEATNKSLRASRSRSTGIAEITLSTEPKTSATGGAVVRIEPEAIVETEKPKKSRFRSTSRGKGTTSKKPRRTLVIIGNVRIAGCMRGHVRGPLRLFEKRLLDRALRHQKDLDIIYVEEFRTTILCSNCNKRCVKSRSPHRSAVDAVAFFEPCVDEMIEWPLGWKTRVGIGDIE

SEQ ID NO: 4136 - protein, 1103 aa, Euura lappo
MGPKKIRVVDTTKKCPHCDKFGHVRSNHKECLKNPRNAAAATSSPGPSASRARPPTPRAGPSSAADDVPETPEDIEEYPDDDEDDVRRRSQICISCGASGHHNAQSRKCTKYRPSARVEHLGEYKTETYTVKCGFRGICGENKKVFDAVQEDVREMSRFIVEVSFLFEYCLRHKNRWLLERWMRSDTAPDLRPMARQLLDGGRRKRDPIHEKFQEMLHEYKAMRKLDAPLYDGYRRTSLYHSAIQELARNFATNVKTHAQARVRTYLQRIVGKDYKEAKADVEALFKSNIRPIIANDRLFDDFQTLDFTTMNKRWWKFLDFFQRLQSRMVEGPTETARAKMEKAREQRAKYAGPGKGKGKGKGKGKGKGKGTGIPSEAPSAVAQTSAKGFAVFPVYGLGAKHLTYSSEAVHELIVRLETRHGVGVVFPKSLGKTPSRWIDVRDDAWGKLWKKCFRLPKRIAPIFALSMSTNGVDVSLHCGRKPRQPLDGFPDREETTKGPSGPASKRRKKNDGSAETEKSGPQLRPVEEYTRFVGLDPGLKIVAGGVIREGIDCRDKDNQQRVCYSSAEFRYDTGFYGRKKTRERLTGDVEAQSADLLKEGSRFADLNTMDPRNYRLITEYRLRRFDLCQSTYEKRSITRLGWQGKMRTRQHVDNLVNYLTTGKLADVFVKKRKEALDKGPAKDLETPAEPAEPAEKTTKRKRRRKREKIRVNVMKRRAREEEIDQLSESTSHMSLDEDENEIPEPMECTPVTHDECSNDTFVLQQRKATFELGSRKSAREPDTSSSSDEGPVEKKPPKKRTKSKSTLKKPGDPSNAEWEWSKKTVAEPTVTTKPSQSTSKPNQTRRNDEDDVNKPSTSKFNLSLSKPHATPKFNLSLTKPQATPRFNLSLAKPQATPKFNLSLNKPHAPPKSNVSKSTPQPTPASTSAPQATPKPKSTPKPTKSKSTPKPTPTPKSDVHPRQKAPDLMETNQPRTPKGSVRQTGRTLVAIGEIQISKWMKGHARGPLRLIKQRLLDRAYRHQRDVDVVIVDEYLTTKNCSKCNNRCSVVSKSPHRFLHCNVCHVTWNRDVNAGVNILNLALVRRKLVPAGYMAASNNFDRGS

SEQ ID NO: 4137 - protein, 1670 aa, Euura lappo
MQICPAEPPSIEPPLSVIEAKNRLRKYVQPEKTKSYAPIRYYYKPDVPMEDDTTYRLSYWEGPNSPVEPFHPEDNLVVGGGEISDDTTHRLSYPGNWCVKPEVPITPCQRQLLGRGPMQDVTTQKHDYTWKLVPRTEPFKGTSNIRSPCATMSDDTTYRLSYYNYNCLSPIKSYAPIREYYKSDVPMDGCTTYRLSYWPTETPAKEEHPWSKKGEYHPPVNPMDTCTTYKLSYWPNCNEKPRKPFSNLDTENILNAKCCFDDNTTYKLSYFGCEADAKREPIRQSENLTLSQCPLSHDTTNRLSYPGNWCPKPESPITPCQRQLLGRGPMQEVTTQKHDYTWKCASGDGDKFRPIDNLEFSPLPLECCTTHRLSFMPINKKSIVPIKSYAPERRYWKSDVPMEGETTMRLSYQPVEVADKVDKPWGARLSYHPPTTPMEDNTTYNLRSVIMIATFLPALWFRCHQKHRRVHPQMTVRVIATVLAVASARPQREREAYTEEVSRGKDQIIDDRRSTTTVIPILQWNKQQDIDGTYKTNYETGNNINAEESGFIKSLQGSDGEMYPSLTQQGSYSYVSPDGTIISASYIADENGFRVVGDHLPTPPPVSEEIQKGLDLIYEGIRLRKEADEREAASKPAQQISAAQSVDRQRDDKERIYRHLLRYAHKRGQKGGLKAKSFHDLVCLQNFNEMGRRKNTKDHDHPENPKGKKQPPPKIKVCAFCQKVGHTSRFSKQCGRSYRKQPSGAEPVPGTSTDSGTLAKDVVRCASCSKYGHKRASSKACDNYQPRAAEQSTGLATKDRQTYSIKCGFGRICKNDVVFRLVNEDVRVISRFLIESSYLIEYCVRDPKRWLVGEWKTMDAQPDIRVMMMHLTRGYTPNANKRPGRQFYSLFAEYIAMRDVHSGGPLYENIHRGPLYDQACAEFTRNFATNVTTHAGVRVRNYLIKIAGMPRTDAYDSVDALFNTNARPVIIDEGNPFNDFDDLDFTEIDTKWWKFVGFYQRLQQRMLEPATEEVQQRDTERRAAAEERRLARAERARAREAENPRKGKSLAKAKKKKKPKVPAAEPQTWGKGFVLVPIYNVGAKHLLYDTGAVQKLLIRAEDESDGQHPFSESPEPVNRNPGAYSKDPLVLWKKCFQIPEKLIRDKKFACSVSTNGVDVSIHCARPKPDDEEDATPSKRRKLSTTGKAKTGEFDRRHPLRDHASDYTRMVGIDPGKKIACGGVIRTSDEDTDAVDKRAKNNQQRICLSTAAFRFNSGFYKREKQRVKLTGTVDLARQNLLATERFVGLNTKDPDRYAIVTEYRLRQFKLCQATYEKRSVTRLHWQKKWRTQQTTDRLVNYLSTGEDTQKQKGHARKRRRRRKKPADEQEEDPAMTLVEALAGNMSIDEDSDDGTSGAKAKADDNHDSSSDSDFEIRRPQSAKTGRGKGPAAKTVTRKPELALPGPSKPSTSFTPKPAERRKAKVVVVDNDYDFSSDSDFEIRRPKSAKTGRGKGPAAKTVTKKPAELALPGPSKPSTSFTPKPAERRKATMSSTPSTKRKSESGQGKVQTLVVLGQFKIPKGTKGSPGAPLTKLLKRFNDRAHRGQKDIHIVIADEFRTTMNCSQCNRKCTKISTGRDRYLYCAPCGITWNRDVNAGQNILNLGLVRNGLVPDGYMPDAENFSRSRRVAR

SEQ ID NO: 4138 - protein, 446 aa, Euura lappo
MVTVKTVAIKSWRVKGTRTTFEFRSRKSAREPDTSSSSDEGPVEKKPPKKRPKSKSTLKKPGDPSTAESEWSKKSVTEPTVTEKPAESTSKPTQPRRKNEDDVSKPSTSRFNLSLSRPHAPPKSNSDVHPRQKAPDPMETNQPRTPKGSVRQTGRTLVAIGEIQISKWMKGHARGPLRLIKQRLLDRSYRHQRDVDVIIVDEYLTTKNCSKCNNRCSVVSKSPHRFLHCEVCHVTSNRDVNAGINILNLALTTRTEQTRGKEDIQTEFYEQDADNYTIPIAGLETGVNCVCTFQGTWRRAIIQNVRPSGDVTLFFYDSGATRTAPSVSIRYLIACGLYDVRPIHPHLWTRTEMTQLYVRIVTICVLATVWEVDRENNCIVLSAVAEPRHARFANRFRSGRSAIARFDIPAWLEARSLAEFYLQIEVVNAVSEKQEFHLINAATEFL

SEQ ID NO: 4139 - protein, 981 aa, Euura lappo
MGRRKNTKDHDHPENPKGKKQPPPKIKVCAFCQKVGHTSRFSKQCGRSYRKQPSGAEPVPGTSTDSGTLAKDVVRCASCSKYGHKRASSKACDNYQPRAAEQSTGLATKDRQTYSIKCGFGRICKNDVVFRLVNEDVRVISRFLIESSYLIEYCVRDPKRWLVGEWKTMDAQPDIRVMMMHLTRGYTPNANKRPGRQFYSLFAEYIAMRDVHSGGPLYENIHRGPLYDQACAEFTRNFATNVTTHAGVRVRNYLIKVAGMPRTDAYDSVDALFNTNARPVIIDEGNPFNDFDDLDFTEIDTKWWRFVGFYQRLQQRMLEPATEEVQQRDTERRAAAEERRLARAERARAREAENPRKGKSLAKAKKKKKPKVPAAEPQTWGKGFVLVPIYNVGAKHLLYDTGAVQRLLIRAEDESDGQHPFSESSEPVNRNPGAYSKDPLVLWKKCFQIPEKLIRDKKFACSVSTNGVDVSIHCARPKPDDEEDATPSKRRKLSTTGKAKTGEFDRRHPLRDHASDYTRMVGIDPGKKIACGGVIRTSDEDTDAVDKRAKNNQQRICLSTAAFRFNSGFYKREKQRVKLTGTVDLARQNLLATERFVGLNTKDPDRYAIVTEYRLRQFKLCQATYEKRSVTRLHWQKKWRTQQTTDRLVNYLSTGEDTQKQKGHARKRRRRRKKPADEQEEDPAMTLVEALAGNMSIDEDSDDGTSGAKAKADDNHDSSSDSDFEIRRPQSAKTGRGKGPAAKTVTRKPELALPGPSKPSTSFTPKPAERRKAKVVVVDNDYDFSSDSDFEIRRPKSAKTGRGKGPAAKTVTKKPAELALPGPSKPSTSFTPKPAERRKATMSSTPSTKRKSESGQGKVQTLVVLGQFKIPKGTKGSPGAPLTKLLKRFNDRAHRGQKDIHIVIVDEFRTTMCCSQCNRKCTKISTGRDRYLYCAPCGITWNRDVNAGQNILNLGLVRNGLVPDGYMPDVANFGRDRRVAR

SEQ ID NO: 4140 - protein, 914 aa, Euura lappo
MGRRKNTKDHDHPENPKGKKQPPPKIKVCAFCQKVGHTSRFSKQCGRSYRKQPSGAEPVPGTSTDSGTLAKDVVQCASCSKYGHKRASSKACDNYQPRAAEQSTGLATKDRQTYSIKCGFGRICKNDVVFRLVNEDVRVISRFLIESSYLIEYCVRDPKRWLVGEWKTMDAQPDIRVMMMHLTRGYTPNANKRPGRQFYSLFAEYIAMRDVHSGGPLYENIHRGPLYDQACAEFTRNFATNVTTHAGVRVRNYLIKIAGMPRTDAYDSVDALFNTNARPVIIDEGNPFNDFDDLDFTEIDTKWWKFVGFYQRLQQRMLEPATEEVQQRDTERRAAAEERRLARAERARAREAENPRKGKSLAKAKKKKKPKVPAAEPQTWGKGFVLVPIYNVGAKHLLYDTGAVQKLLIRAEDESDGQHPFSESPEPVNRNPGAYSKDPLVLWKKCFQIPEKLIRDKKFACSVSTNGVDVSIHCARPKPDDEEDATPSKRRKLSTTGKAKTGEFDRRHPLRDHASDYTRMVGIDPGKKIACGGVIRTSDEDTDAVDKRAKNNQQRICLSTAAFRFNSGFYKREKQRVKLTGTVDLARQNLLATDRFVGLNTKDPDRYAIVTEYRLRQFKLCQATYEKRSVTRLHWQKKWRTQQTTDRLVNYLSTGEDTQKQKGHARKRRRRRKKPADEQEEDPAMTLVEALAGNMSIDEDSDDGTSGAKAKADDNHDLSSDSDFEIRRPKSAKTGRGKGPAAKTVTKKPELALPGPSKPSTSFTPKPAERRKATMSSTPSTKRKSESGQGKVQTLVVLGQFKIPKGTKGSPGAPLTKLLKRFNDRAHRGQKDIHIVIVDEFRTTMCCSQCNRKCTKISTGRDRYLYCAPCGITWNRDVNAGQNILNLGLVRNGLVPDGYMPDVANFGRDRRVAR

SEQ ID NO: 4141 - protein, 1101 aa, Euura lappo
MGPKKIRVVDTTKKCPHCDKFGHVRSNHKECLKNPRNAAAATSSPGPSASRARPPTPRAGPSSAADDVPETPEDIEEYPDDDEDDVRRRSQICISCGASGHHNAQSRKCTKYRPSARVGHLGEEKTETYTVKCGFWGLCAENKKVFDAVQDDVRQMSRFIVEVSFLFEYCLRHKNRWLLEQWMRSDTAPDLRPMARHLLVEGRKKRDPIHEKFQEMLHEYKAMRKLDAPLYDGYRRTSLYHSAIQELARNFATNVKTHAQARVRTYLQRIVGKDYKEAKADVEALFKSNIRPVIANDRLFDDFQTLDFTTMNKRWWKFLDFFQRLQSRMVEGPTETARAKMEKAREQRAKYAGPGKGKGKGKGKGKGTGTSSEAPSAVAQTSAKGFAVFPVYGLGAKHVTYSSEAVHELIVRLETPHGVGVVFPESLGKTPRRWIDVRDDAWGKLWKKCFRLPERVLPIFALSMSTNGVDVSLHCGRKPRQPLDGFPDREETTKGPSGPASKRRKKNDGSAETEKSGPQLRPVEEYTRFVGLDPGLKIVAGGVIREGIDCRDKDNQQRVCYSSAEFRYDTGFYGRKKTRERLTGDVEAQSADLLKEGSRFADLNTMDPRNYRLITEYRLRRFDLCQSTYEKRSITRLGWQGKMRTRQHVDNLVNYLTTGKLADVFVKKRKEALDKGPAKDLETPAEPAETTTKRKRRRKREKIRVNVMKRRARAEEIDQLSESASQMSLDEDKDEIPEPMECTPVTHDECSSDTFVLQQRKAEIELESRKPAREPDTSSSSDEGVFEKKPPKKRPKSKSTLKKPGDPSTAEWEWSKKSVAEPTVTEKPAESTSKPTQPRRNDKDGVNRPSTSKFNLSISRPLHAPLTKKPAESTSKPTQPRRNDEDDVNKPSTSKFNLSLSKPPPKFNLSLNKPHAPPKSNVSKSTPQPTPASTSAPQATPKPKSTPKPTPTPKSDVHPRQKAPDLMETNQPRTPKGSVRQTGRTLVAIGEIQISKWMKGHARGPLRLIKQRLLDRAYRHQRDVDVVIVDEYLTTKNCSKCNNRCSVVSKSPHRFLHCNVCHVTWNRDVNAGVNILNLALVRRKLVPAGYMAASNNFDRGS

SEQ ID NO: 4142 - protein, 934 aa, Euura lappo
MPKKKPPPQKPEGEPPPPTQKLPRVRKKKLSAAEKAKLQCPTCKEFGHEDRSWKECSKHEAKCSSCGAWGHSRSTSKNCKFHTQRVKALLLGTECTETYAIKTGFRHVCTNDAFFDAVNEDVLEVTRLMIETSYFIEFCLRHKNRWLLQKWIESDTAPSLYTFAAHLAADSKPPADETFAAMLAQYRQLRGTDVPWYKTSKRTRLLDQNLVTLATNFATNVTTHARTRVRKYLQQMVGKSYDEAKKATEDLFATNTRPENIADELFDWDRLTQGLNFPEIDNEWWKFLDFYQELQKRMVKERTPAGVAKFEAARANAASYSSKSSGNGKTPANGKRAFKGRQALTSGKVQSASSAVDEASTSSAGLPAPETSEPRTQASAKGFVLFPIKSVGAGHIRYATDAVRQLCERVLHLTSGQLQKQLDKILEEKGEEKNTGNISKEIWNMCFKAPPNVAKAFAGSMSTNGVDISWSCGRPSRSDQIAGHATKKRKTNAGGAVTDDLQDRFVGVSKDVKMEDYDRIIGFDPGLKAAFGGIIVKNNQRGKDAEQRVCYRSSEFRYITGEFERAKRRKRVTDEVDKLNAELLQRDFPDLNTKNPDDYVNITNYRLRHFQLCQPIYEKRCITRLSWQKKMHVRKAVDDLVNYWVDGDLKREKKIEAQTEKKSKKKAPKTRRRKREKIRLGKMRKQTGKKPAIKKTTDKHPKVECGTSGMDVEMLQDLYDSVGSMSLDEDDGEVDMVEPEATNKSLRASRSRSTGIAEITLSTEPKTSATGGAVVRIEPEAIVETEKPKKSRFRSTSRGKGTTSKKPRRTLVIIGNVRIAGCMRGHVRGPLRLFEKRLLDRALRHQKDLDIIYVEEFRTTILCSNCNERCLKSRSPHRYLFCQTCRITWNRDVNAGRNIQHLGLHRQALVGEDFLAKYLPKPGQFTRHERLLES

SEQ ID NO: 4143 - protein, 934 aa, Euura lappo
MPKKKPPPQKPEGEPPPPTQKLPRVRKKKLSAAEKAKLQCPTCKEFGHEDRSWKECSKHEAKCSSCGAWGHSRSTSKNCKFHTQRVKALLLGTECTETYAIKTGFRHVCTNDAFFDAVNEDVLEVTRLMIETSYFIEFCLRHKNRWLLQKWIESDTAPSLYTFAAHLAADSKPPADETFAAMLAQYRQLRGTDVPWYKTSKRTRLLDQNLVTLATNFATNVTTHARTRVRKYLQQMVGKSYDEAKKATEDLFATNTRPENIADELFDWDRLTQGLNFPEIDNEWWKFLDFYQELQKRMVKERTPAGVAKFEAARANAASYSSKSSGNGKTPANGKRAFKGRQALTSGKVQSASSAVDEASTSSAGPPAPETSEPRTQASAKGFVLFPIKSVGAGHIRYATDAVRQLCERVLHLTSGQLQKQLDKILEEKGEEKNTGNISKEIWNMCFKAPPNVAKAFAGSMSTNGVDISWSCGRPPRSDQIAGHATKKRKTNAGGAVTDDLQDRFVGVSKDVKMEDYDRIIGFDPGLKAAFGGIIVKNNQRGKDAEQRVCYRSSEFRYITGEFERAKRRKRVTDEVDKLNAELLQRDFPDLNTKNPDDYVNITNYRLRHFQLCQPIYEKRCITRLSWQKKMHVRKAVDDLVNYWVDGDLKREKKIEAQTEKKSKKKAPKTRRRKREKIRLGKMRKQTGKKPAIKKTTDKHPKVECGTSGMDVEMLQDLYDSVGSMSLDEDDGEVDMVEPEATNKSLRASRSRSTGIAEITLSTEPKTSATGGAVVRIEPEAIVETEKPKKSRFRSTSRGKGTTSKKPRRTLVIIGNVRIAGCMRGHVRGPLRLFEKRLLDRALRHQKDLDIIYVDEFRTTILCSNCNKRCVKSRSPHRYLFCQTCRITWNRDVNAGRNIQHLGLHRQALVGEDFLAKYLPKPGQFTRHERLLES

SEQ ID NO: 4144 - protein, 419 aa, Euura lappo
MDPRNYRLITEYRLRRFDLCQSTYEKRSITRLGWQGKMRTRQHVDNLVNYLTTGKLADVFVKKRKEALDKGPARNLETPAEPAEKTTKRKRRRKREKIRVNVMKRRAREKEIDQLSESASHMSLDEDEDEIPEPMECTPVTHDECSNDTFVLQQRKATFELRSRKSAREPDTSSSSDEGPVEKKPPKKRPKSKSTLKKPGDPSTAEWEWSKKTVAEPEVTKKPAESTSKPTQPRRNDEDDSDVHPRQKAPDPMETNQPRTPKGSQTGRTLVAIGEIQISKWMKGHARGPLRLIKQRLLDRAYRHQRDVDVIIVDEYLTTKNCSKCNNRCSVVSKSPHRFLHCKVCHVTSNRDVNAGINILNLALLIDFTEDFTHAKVYLYGKNAGIQLPGTFIISVFNVKEKTHNRTIKSLSTLEVQKG

SEQ ID NO: 4145 - protein, 939 aa, Euura lappo
MPKKKPPPQKPEGEPPPPTQKLPRVRKKKLSAAEKAKLQCPTCKEFGHEDRSWKECSKHEAKCSSCGAWGHSRSTSKNCKFHTQRVKALLLGTECTETYAIKTGFRHVCTNDAFFDAVNEDVLEVTRFLIETSYFIEFCLRHKNRWLLQKWIESDTAPSLYTFAAHLAADSKPPADETFAAMLAQYRQLRGTDVPWYKTSKRTRLLDQNLVTLATNFATNVTTHAQTRVRKYLQQMVGKSYDEAKKATEDLFATNTRPENIADELFDWDRSTQGLNFPEIDNECLVVDRWKFLDFYQELQKRMVKERTPAGVAKFEAARANAASYSSKSSGNGKTPANGKRAFKGRQALTSGKVQSASSAVDEASTSSAGLPAPETSEPRTQASAKGFVLFPIKSVGAGHIRYATDAVRQLCERVLHLTSGQLQKQLDKILEEKGEEKNTGNISKEIWNMCFKAPPNVAKAFAGSMSTNGVDISWSCGRPSRSDQIAGHATKKRKTNAGGAVTDDLQDRFVGVSKDVKMEDYDRIIGFDPGLKAAFGGIIVKNNQRGKDAEQRVCYRSSEFRYITGEFERAKRRKRVTDEVDKLNAELLQRDFPDLNTKNPDDYVNITNYRLRHFQLCQPIYEKRCITRLSWQKKMHVRKAVDDLVNYWVDGDLKREKKIEAQTEKKSKKKAPKTRRRKREKIRLGKMRKQTGKKPAIKKTTDKHPKVECGTSGMDVEMLQDLYDSVGSMSLDEDDGEVDMVEPEATNKSLRASRSRSTGIAEITLSTEPKTSATGGAVVRIEPEAIVETEKPKKSRFRSTSRGKGTTSKKPRRTLVIIGNVRIAGCMRGHVRGPLRLFEKRLLDRALRHQRDLDIIYVDEFRTTILCSNCNKRCVKSRSPHRYLFCQTCRITWNRDVNAGRNIQHLGLHRQALVGEDFLAKYLPKPGQFTRHERLLES

SEQ ID NO: 4146 - protein, 934 aa, Euura lappo
MPKKKPPPQKPEGEPPPPTQKLPRVRKKKLSAAEKAKLQCPTCKEFGHEDRSWKECSKHEAKCSSCGAWGHSRSTSKNCKFHTQRVKALLLGTECTETYAIKTGFRHVCTNDAFFDAVNEDVLEVTRFLIETSYFIEFCLRHKNRWLLQKWIESDTAPSLYTFAAHLAADSKPPADETFAAMLAQYRQLRGTDVPWYKTSKRTRLLDQNLATLATNFATNVTTHARTRVRKYLQQMVGKSYDEAKKATEDLFATNTRPENIADELFDWDRSTQGLNFPEIDNEWWKFLDFYQELQKRMVKERTPAGVAKFEVARANAASYSSKSSGNGKTPANGKRAFKGRQALTSGKVQSASSAVDEASTSSAGLPAPETSEPRTQASAKGFVLFPIKSVGAGHIRYATDAVRQLCERVLHLTSGQLQKQLDKILEEKGEEKNTGNISKEIWNMCFKAPPNVAKAFAGSMSTNGVDISWSCGRPPRSDQIAGHATKKRKTNAGGAVTDDLQDRFVGVSKDVKMEDYDRIIGFDPGLKAAFGGIIVKNNQRGKDAEQRVCYRSSEFRYITGEFERAKRRKRVTDEVDKLNAELLQRDFPDLNTKNPDDYVNITNYRLRHFQLCQPIYEKRCITRLSWQKKMHVRKAVDDLVNYWVDGDLKREKKIEAQTEKKSKKKAPKTRRRKREKIRLGKMRKQTGKKPAIKKTTDKHPKVECGTSGMDVEMLQDLYDSVGSMSLDEDDGEVDMVEPEATNKSLRASRSRSTGIAEITLSTEPKTSATGGAVVRIEPEAIVETEKPKKSRFRSTSRGKGTTSKKPRRTLVIIGNVRIAGCMRGHVRGPLRLFEKRLLDRALRHQKDIDIIYVDEFRTTILCSNCNKRCVKSRSPHRYLFCQTCRITWNRDVNAGRNIQHLGLHRQALVGEDFLAKYLPKPGQFTRHERLLES

SEQ ID NO: 4147 - protein, 1122 aa, Euura lappo
MGPKKIRVVDTTKKCPHCDKFGHVRSNHKECLKNPRNAAAATSSPGPSASRARPPTPRAGPSSAADDVPETPEDIEYPDDDEDDVRRRSQICISCGASGHHNAQSRKCTKYRPSARVGHLGEEKTETYTVKCGFWGLCAENKKVFDAVQDDVREMSRFIVEVSFLFEYCLRHKNRWLLERWMRSDTAPDLRPMARHLLVEGRQKRDPIHEKFQEMLHEYKAMRKLDAPLYDGYRRTSLYHSAIQELARNFATNVKTHAQARVRTYLQRIVGKDYKEAKADVEALFKSDIRPVIANDRLFDDFQTLDFTTMNKRWWKFLDFFQRLQSRMVEGPTETARAKMEKAREQRAKYAGPGKGKGKGKGKGKGKGKGTGIPSEAPSAVAQTSAKGFAVFPVYGLGAKHVTYSSEAVHQLIVRLETRHGVGVVFPESLGKTPSQWIDVRDDAWGKLWKKCFRLPERIVPIFALSMSTNGVDVSLHCGRKPRQPLDGFPDREETTKGPSGPASKRRKKNDGSAETEKSGPQLRPVEEYTRFVGLDPGLKIVAGGVIREGIDCRDKDNQQRVCYSSAEFRYDTGFYGRKKTRERLTGDVEAQSADLLKEGSRFADLNTMDPRNYRLITEYRLRRFDLCQSTYEKRSITRLGWQGKMRRRQHVDNLVNYLTTGKLADVFVKKRKEALDKGPAKDLETPAEPAEPAEKTTKRKRRRKREKIRVNVMKRRAREEEIDQLSESTSHMSLDEDENEIPEPMECTPVTHDECSNDTFVLQQRKATFELGLRKSAREPDTSSSSDEGPVEKKPPKKRTKSKSTLKKPGDPSNAEWEWSKKSVAEPEVTEKPAESTSKPTQPGRNDKDGVNRPSTSKFNLSISRPLHAPLTKKPAESTSKPTQPRRNDEDDVNKPSTSKFNLSLSKPPPKFNLSLNKPHAPPKSNVSKSTPQPTPASTSAPQATTPKPKSTPKPTKSKSTPKPTPTPKSDVHPRQKAPDLMETNQPRTPKGSVRQTGRTLVAIGEIQISKWMKGHARGPLRLIKQRLLDRAYRHQRDVDVIIVDEYLTTKNCSKCNNRCSVVSKSPHRFLHCKVCHVTWNRDVNAGINILNLALVRRKLVPAGYMPASDNFNRGSRTTGS

SEQ ID NO: 4148 - protein, 810 aa, Skeletonema costatum
MSFLHGTAVDQDVRMTTAKMGINTALSGWKRAAIKASFSNITTVASTLAVQGAHLHNFLITSHVVKGNELTYDMIVGQQYLYAVYNDNTFLRGVPLGEVGSEIPTHHRQASSLRNKITKINRRPALRDILKKLFRDDAQQQRALIGLNDLDSLMVSSRSNDVDPGIPQGLSEVINYIVRDQTTNIFNQLKPKAMGLIKDAVSAHIKNKEPIITPSAETALRKELMKRIKTPTLTQRVVLDESDLALVARLRNGFFDSPQFDDEDRSTKWLDDDYFEMITTPSKKKKMLPMIITHFVKCLMAQERLEDDFQPRPHVSELNAKKRSPLPLFQKGLQHINLDARTLYYLIKHAKNLEHNNGRSSTEPDDPHWPQSAKAFEKNRPLVRQWIHRVFNFHQWKRTRSGGGKWRVSDDKGIFATSNGVDISVLLRNRDDEVTRDRDDEVTLRQSNRMLNLSPAHDDDEEDDDDEEDDDVSMEIPDDRPTFVASIDPGRRNIIYCIITDTDGKFLKRVVLTRAGYYDTAKINAVRDRINERNKKEELKKMYTAFSDNHFLTSDDLLQVQAFKTYVSYHTTLWTEKTRKWWYRQRFHVFQNKDRVVDNLLNDIGADVTVDGVTYVLGEVRYEDGNFPSGRRTEQYVPCLFIKRRVKARFPTTDIDKHRTSQVCPDCHHRLLDVGMQDSINGSVQTTMGLKWCESVECEGNRLKTRDESSCYCIFQKGEDEYHEIFNHAGEGDEHYWDRPAERHVMHRYGMTGSRKNGRRKDDDDDYGMRMIGERLFDCRRDDMLWNGASPERSFDLYVRVSIAAEGGKG

SEQ ID NO: 4149 - protein, 1256 aa, Skeletonema costatum
MPIQVASTDHPSTASVTANNGAQQPLRRSPRLAANNAARNAANDDAHNATQSSTAAVATRCTTRCSAACASAAAAGDLRYSGVRKNSSGMNTGIQKNACDRLFNSLKADYRIQNLFTVEDLERALAKSDYVTVKPATVEDFFDYDKFLRMFYRKLPQQINQNHVFSCGSMEDAQGCTLGSDFKISLLRSFREADKAAAVIPQKCRKRNWWTALPERNHANEAEASLKRVDDLKEMCGDRDKLTVVKPPGLNPYKVVEMWSNFRPLVPLDKKDDVLYREPTAEEWAVVKKEKKLNKEKKVEVKKMKRETMETEDEVVGDDSRKAKKPRTTDSSVPNAFYRELQQVDGIINYDHITHPRRCYNGNWTEEERIAKHREHYLRTHICTVLGEAGTRATRQTIDLDAFTDDPEHFVSFITTRVQDTGELMKPIVYGGYKSNLMFLFKRYRYIPRAGYSVELKEYMDGVKRIANEARAAGENLCGMSPTEELVATKESRSRWEVDGADVECCVSAKFGATFTPKVSPKFWHNKTMADESPKYVAATCRMYLSSSIRNSLDIFSRGDTSKERIIGSITSVSHYAAKCRNRGSQVMAACALDCYNKREHTFPAITDGHGKATPFVSHAFNINLPLWKNKPYATEISEEVVSLMNQCYPITLVCDDEGKSAFSGYSRFNKSLTNTYATCAGNHARMNFFIYQNKTILDFLRSRGHKFPKISCKELIKIIKCRINNLDVEEDDANDDMLDELVPDENRDENGGLHRDDVEHFINFHRSFFSLRNIDAPIDDDWVEDDDNTGVIILYFVHLLTYQERLQRSHPTLKVQLFHPLPMHKMKPCHIEIEPISLFYILKRAGLEPGTTYWRQQPGHQPNQRIPFPSSERGCTDAMKRWWPIIFRTEIGRTSNRDHYTSQGIRTNGVMASLIYVKTLNPATTSDIQLDMEEVEDFQNVERGRPFSHDKGDHEDSSDASASHAAAESEGDDSSAVPENAEEDPPAPPQDDPEEPAQAFAGVDPGLVDLCLRTLSQAIRLRTRDEVWKRCWEQAFNKSILRAHGYCDGMKRKSLQDQMNIIKSNLKSDQCFENGAELQSVGFGNGSFGSSMPGMEGGVPTKAVKVTMARNFNTQHVDEWRSSSSCPCCHRQLKNLFHWYDGKRHYVRGIKFCASEQCKSHRFWHRDWVGAYNILVRHLVDLEVLDGDQIPFFLQRATTRHARWRPNKSERNLLELKTSRRVALPRKKMKRIVKKKRKAKKEKKRNRVKRRNDEC

SEQ ID NO: 4150 - protein, 294 aa, Cotesia chilonis
MVCPSCGKDDHQRSSSAKCLNRKRRIRETAIADDQEISVYSVKKGLTSVLCPLSDYKEAIARAIRDDVREMSRLSIELSYVAKKSEDALQNTTVSSVRNYSKVIAVDPGAKTPIVTCTRNGGDFSYKILKKERVVYESKECHRARKRLRFLKDIEDRIKSDRESTEQEIGLELTRKSQNAEPYTRFQLKWFDEKQRIYEQRRVQRLKFDKYINDQKMLHKIVDECFGKEPDTLVVYGAGFGFMNKGTFKSHRKFRHNDVIKIIKQRRNLSFDAAAWAVKYRITKFIPGSLESVE

SEQ ID NO: 4151 - protein, 599 aa, Cotesia chilonis
MVCPSCGKDDHQRSSSAKCLNRKRRIRETAIADDQEISVYSVKKGLTSVLCPLSDYKEAIARAIRDDVREMSRLSIELSYVVNFFYKHYSHREDFHILFPKFDALQFTYALKGVKYKLNDPDNVISTYKSIRNPNNLYDGRLRSFTIMQIAKQYSTVLETNIATHAFKRIKRYMYHKFGESMDKSEVHSSTYDAYYNGVCKSNGIGEWFNENRINSKEVSKNFWKFVPLFLQIQHEMYDQGKLSFNVFPIYSHGLKFITYDSRCIHELLRRVDSSNTPSSWPEFSENVTMYWNRHFTLPRNFGYSFSTDGVSVCLSMNRIVQKFNSKKAKKSEDALQNTTVSSVRNYSKVIAVDPGAKTPIVTCTRNGGDFSYKILKKERVVYESKECHRARKRLRFLKDIEDRIKSDRESTEQEIGLELTRKSQNAEPYTRFQLKWFDEKQRIYEQRRVQRLKFDKYINDQKMLHKIVDECFGKEPDTLVVYGAGFGFMNKGTFKSHRKFRHNDVIKIIKQRRNLSVYVINEAYTTKNCSYCHDRDRIQQKLSVSKSPHRYVYCSVCRKGIHRDKNGAKNILLKYENKLPISLSSVGTDMNLVDGVIS

SEQ ID NO: 4152 - protein, 706 aa, Listronotus oregonensis
MVFCSSCLQTDHSRSSSARCLKRKRRIRERDLKTYDEALEIYTIKKCLASTVCPLLATKTQLLQKIQQDVREVSRLSIEMSVLVNLFYKSYFSVCPTRAIFYQFFPKFSPLHFMYVLQDKRNQIYDPAKVIDAYKAKRQGSAYIGGCRSYIIQEAAKQYETVFHTNITTHMFSRVKRYLRLLLPQETPAKIHRQAFQFYYDSNNRSPTEGTGPENLASPATNDAVDVIKQFFRDHNLDARSVTKDPWSYVYLLLAMQQKFEITENERSIQVFPKYSHGCKYIRYTSMGLYELLRSIKEPDVPGDAVKFREDAPKYWRRYFSLPRNDKNFGYSISTDGVAVSLSMNRTIKKTKKTKRGAHKKPASPTTTITVDTDTFVPNNTTRKLTRILAVDSGAKTPIVTCDDSLQYQILRKEQVAHETKDYMRKQKRAKWTRTIDKKINIEQEAVGFDKTSSRSIQYVHFYTSFFLRHFEEKQQCYERRNLLRLKFDKYVHQQKLQHRLIRKYFSRPNEHSLVLYGAGYQFMNTASFKGHRKLGHNKLVACMRRYYTSTITCVDVDESYTTKTCSYCRRTSGGRTITNVQVAKKHGHRYLFCSKCHKGIHRDKNGAQNILLKFVQKQFVGLLSWIDKDLSPDNAGLGRHVVNGENRNSFSFLTGAKGLFSFAPMALKQMIWFCVSNTYPRSSCLRINNLLSCPRNSVRTRRSIM

SEQ ID NO: 4153 - protein, 673 aa, Listronotus oregonensis
MVFCPSCLQTDHLRSSSARCLKRKRRIRERDLKSDEALEVYTVKKCLASTVCPLLATKPQLLQKIQQDVREVSRLSIEMSVLVNLFYKSYFSICPNRAVFYQFFPKFSPLHFMYVLQDKRNQIYDLAKVIDAYKARRQGKAYVGFCRTYIIQEAAKQYETVFHTNITTHMFSRVKRYLGLILPNETPAKIHEKAFELYYPSSPMGTKNNASLSATDEAVDVIKQFFRDHNLDVRSVEKDPWSYVYLLLAMQQKFEITENERSIQVFPQYSHGCKYIRYTSTGLYELLRSIKEPDVPGDHVKFREDAPKYWRRYFSLPRDKNFGHSISTDGVAVSLSMNQTITKTIKKTAKTRKFSSHIVEPAFVPNNTTRKLTRILAVDPGAKTPIVTCDDSLHLVLYGAGYQFMNTASFKGHRKFGHNKLVACMRRYYASAVTCVDVDESYTTKTSSYCRRTSGGRTITNVQVAKKHGHRYVFCSKCHKGIHRDKNGAQNILLKFVQKQFVGLLSWIDKDFCLATPPASAGMSLRARIAEPSALHATEELVLQVGELSQYRRPAAFCQSIYKQLAAETLVEQVLAPPPPSGKRQYKETADDEAMAFVRQLGAWLTRIIVKTTRLNARLPIGRLVKKFRWDEVELCEPFHDDSLIRACIVKWAADAHVPIDDRHGLMGVEVAT

SEQ ID NO: 4154 - protein, 521 aa, Listronotus oregonensis
MVFCPSCLQTDHLRSSSARCLKRKRRIRERDLKSDEALEVYTVKKCLASTVCPLLATKPQLLQKIQQDVREVSRPSIEMSVLVNLFYKSYFSICPNRAVFYQFFPKFSPLHFMYVLQDKRNQIYDLAKVIDAYKARRQGKAYVGFCRTYIIQEAAKQYETVFHTNITTHMFSRVKRYLGLILPNETPAKIHEKAFELYYPSSPMGTKNNASLSATDEAVDVIKQFFVIIISTSDPWKKIRGHTFIYCSPCSKSSKSPRMNGAFKFFRSIRTVATVDPGAKTPIVTCDDSLQYQILRKEQVAHETKDYMRKQKRAKWTRNIDKKIHIEQEAVGFDKTSSRSIQYVHFYTSFFLRHFEEKQQCYERRNLLRLKFDKYVHQQKLQHRLIRKYFSRPNEHSLVLYGAGYQFMNTASFKGHRKFGHNKLVACMRSILRFGGNVRGRGRVVHHENVQLLPSNQWRAHNHQCSSIHRDKNGAQNILLKFVQKQFVGLLSWIDKDFCLATPPASAGMSLRARIVTLSAS

SEQ ID NO: 4155 - protein, 917 aa, Listronotus oregonensis
MDLSSRSESKSPVSKHSGGGPETQTHIKKRQQQQRKRASRLRYFKRTRKLLVAVSQLLLLFRRNIARWQKKIDPPPPLPLVNTAKHSSGPPSTLDTIVYTTAPSIGACLRDYSAHDTNEALDLRAHTNSYTRRHPILNSLLESDAPRLTLSRSVVPYRDHLCYAKSALTCKKNLLRVDETRMVFCPSCLQTDHLRSSSARCLKRKRRIRERDLKSDEALEVYTVKKCLASTVCPLLATKPQLLQKIQQDVREMSRLSIEMSVLVNLFYKSYFSICPNRAVFYQFFPKFSPLHFMYVLQDKRNQIYDLAKVIDAYKARRQGKAYVGFCQTYIIQEAAKQYETVFHTNITTHMFSRVKRYLGLILPNETPAKIHEKAFELYYPSSPMGTKNNASLSATDEAVDVIKQFFRDHNLDVRSVEKDPWSYVYLLLAMQQKFEITENERSIQVFPQYSHGCKYIRYTSTGLYELLRSIKEPDVPGDHVKFREDAPKYWRRYFSLPRDKNFGYSISTDAVDPGAKTPIVTCDDSLQYQILRKEQVAHETKDYMRKQKRAKWTRNIDKKIHIEQEAVDLTRLHRAPSKKQQCYERRNLLRLKFDKYVHQQKLQHRLIRKYFSRPKEHSLVLYGAGYQFMNTASFKGHRKFGHNKLVACMRRYYASAVTCVDVDESYTTKTCSYCRRTSGGRTITNVQVAKKHGHRYVFCSKCHKGFLPGNAAGLGRDVVKGENRNSFCFLTGAKGLREAILSQSGSPEEARVCDDNESALDSKRLSTAAAVPAALGEQSDFSFLPSSIGPFPPLPPWITPARNISFIICCLQFLPYAQFRNYGSWYFIRRPVNLIADSVKKFLAEHAHSVVLKSWYTTKPYFTIRNEILKHMPQLQMLRFCTLITRLPLRNTEEQQILNRQLCDVVDALLLPPSCH

SEQ ID NO: 4156 - protein, 576 aa, Listronotus oregonensis
MVLPRQGWFFALRVCKPTTCAPAVLVVSNKIQQDVREVSRLSIEMSVLVNLFYKSYFSICPNRAVFYQFFPKFSPLHFMYVLQDKRNQIYDLAKVIDAYKARRQGKARVKRYLGLILPNETPAKIHEKAFELYYPSSPMGTKNNASLSATDEAVDVIKQFFHDHNLDVRSVEKDPWSYVYLLLAMQQKFEITENERSIQVFPQYSHGCKYIRYTSTGLYELLRSIKEPDVPGDHVKFREDAPKYWRRYFSLPRDKNFGYSISTDGVAVSLSMNRTITKTIKKTAKTRKFSSHIVEPAFVPNNTTRKLTRILAVDPGAKTPIVTCDDSLQYQILRKEQVAHETKDYMRKQKRAKWTRNIDKKIHIEQEAVGFDKTSSRSIQYVHFYTSFFLRHFEEKQQCYERRNLLRLKFDKYVHQQKLQHRLIRKYFSRPNEHSLVLYGAGYQFMNTASFKGHRKFGHNKLVACMRRYYASAVTCVDVDESYTTKTCSYCRRTSGGRTITNVQVAKKHGHRYVFCSKCHKGIHRDKNGAQNILLKFVQKQFVGLLSWIDKDFCLATPPASAGISLRARIVTLSAS

SEQ ID NO: 4157 - protein, 746 aa, Listronotus oregonensis
MEHASPPTPIEGASEMTIDQAFNAMSSLTVMFTGNFITLEIKMKDHREIAFNILKAFLNKACKILEASFYLWSLLKATAAHRXLVQVHALEPNGTIQVHDDGNINTVVGLDDRMISCFGENTAQSKRWVTKRRHVQIGLALSRPVVPYRDHLCYAKSALTYRRNLLRVDEVRNIVRKESDSARCLKRKRHIRERDLKNDEALEVYTIKKCLASTKIQQDVREVSRLLIEMSVLVNLFYKSYFTVCPTRVMFYHFFPKFAPLHFMYVLQDKRNQIYDPAKVIDAYKAKRQGSAYIGGCRSFIIQEAAKQYEAVFNTNITTHMFSRVKRYLRLLLPKETPAKIHRQAFQFYYDSNNSSPTEGTGPENIASPATNDAVDVIKQFFRDHNLDARSVTKDPWSYVYLLLVMQQKFEITEKERSIQVFPQYSHGCKYIRYTSMGLYELLRSIKEPDVPGDAVKFREDAPKYWRRYFSLPRNDTNFGYSISTDGVAVSLSMNRTIKKTKKTKKAAKKNPSPTTTITVGTDTFVPNNNTTRKLTRILAVAPSAKTPIVTCDDSLQYQILRKEQVAHETKDYMRKQKRAKWTRNVDKKINREQEAVSFNKTSSRSIQYVHFYTSFFLRHFEEKQQCYERRNLLRLKFDKYVHQQKLQHMLIRKYFSRPNEHSLVLYGAGYQFMNTASFKGHRKFGHNKLVACMRRYYASTITCVDVHGRVVHHENVQLLPSKQWRAHNHQCSSREKTWTPLCVLQ

SEQ ID NO: 4158 - protein, 626 aa, Listronotus oregonensis
MVFCPSCLQTDHLRSSSARCLKRKRRIRERDLKSDEALEVYTVKKCLASTVCPLLATKPQLLQKIQQDVREVSRLSIEMSVLVNLFYKSYFSICPNRAVFYQFFPKFSPLHFMYVLQDKRNQIYDLAKVIDAYKARRQGKAYVGFCRTYIIQEAAKQYETVFHTNITTHMFSRVKRYLGLILPNETPAKIHEKAFELYYPSSPMGTKNNASLSATDEAVDVIKQFFRDHNLDVRSVEKDPWSYVYLLLAMQQKFEITENERSIQVFPQYSHGCKYIRYTSTGLYELLRSIKEPDVPGDHVKFREDAPKYWRRYFSLPRDKNFGYSISTDGVAVSLSMNRTITKTIKKTAKTRKFSSHIVEPAFVPNNTTRKLTRILAVDPGAKTPIVTCDDSLQYQILRKEQVAHETKDYMRKQKRAKWTRNIDKKFTLNKRPWDLTRLHRAPSKKQQCYERRNLLRLKFDKYVHQQKLQHRLIRKYFSRPNEHSLVLYGAGYQFMNTASFKGHRKFGHNKLVACMRRYYASAVTCVDVDESYTTKTCSYCRRTSGGRTITNVQVAKKHGHRYVFCSKCHKGIHRDKNGAQNILLKFVQKQFVGLLSWIDKDFCLATPPASAGMSLRARIVTLSAS

SEQ ID NO: 4159 - protein, 640 aa, Leptopilina boulardi
MTVMFRLMWMLIVVSRVRRQLFPPEEEEQSPKEPNASDVSDFVYRPNAPCQDDDDDPQLFPPEEEEQSPKEPNASDVSDFVYRPNAPCQDDDDDPQLFPPEEEEQSPKEPNASDVSDFVYRRNASDQQVSSTESRQPELPILHDENTKMSIDGESQTFAFNASDDEKTSKYKEPTEEEEDDEEMEVNRGNIIKTKLDNLFKHNECDSETLKTLNVENLDFRDLGKRNKCHKFLIFFHRLQGYFARQGRKSFLLVPIMKPGLKYITYTNTGLADLEKELLKVSSDYTPIEKASEQSKLLYDEKTALGREAKNLERENSPQNAKRLSSIKSRVKEIANQLTPIKEEMKLENKRHQNVKDQRRPDRENVNDQRHEQPETPDLTQYKVLKGLDPGLKFAFGGVERNMTPEFNIKSVDKPIKISTKSYRWQTQENSRRAILHKHTKDYKKFYHDLQVCDKYRGKVNHKDPRQIFISTEYLLESFNRNQPFQEKRKVAALKWDKYMCVQRETDYLANYLVGDTNKKQLLAIGSPKISPWMKGHVRMPLRKVMKRLIEKQSKYENLRIVFVDEYLTTKLCSCCNKRMKIKINRTARCATCKTSWNRDVNAGKNILNLALVRLGIIDKTLLPHWDKFRALWKLRDWDV

SEQ ID NO: 4160 - protein, 480 aa, Leptopilina boulardi
MEVNRGNIIKTKLDNLFKHNECDSETLKTLNVENLDFRDLGKRNKCHKFLIFFHRLQGYFARQGRKSFLLVPIMKPGLKYITYTNTGLADLEKELLKVSSDYTPIEKASVMFSKDQISAQELKHKNIITPLKEQSKLLYDEKTALGREAKNLERENSPQNAKRLSSIKSRVKEIANQLTPIKEEMKLENKRHQNVKDQRRPDRENVNDQRHEQPETPDLTQYKVLKGLDPGLKFAFGGVERNMTPEFNIKSVDKPIKISTKSYRWQTQENSRRAILHKHTKDYKKFYHDLQVCDKYRGKVNHKDPRQIFISTEYLLESFNRNQPFQEKRKVAALKWDKYMCVQRETDYLANYLVGDTNKKQLLAIGSPKISPWMKGHVRMPLRKVMKRLIEKQSKYENLRIVFVDEYLTTKLCSCCNKRMKIKINRTARCATCKTSWNRDVNAGKNILNLALVRLGIIDKTLLPHWDKFRALWKLRDWDV

SEQ ID NO: 4161 - protein, 1602 aa, Leptopilina boulardi
MKKIKGSSKGKPPSAPFNVRVDDVGENYIDISWSSSPAQRKDDLVITNYIVELGEERRKLQPVLIVKAPQNSGRISKLEINKTYTLGVRSINSHGLSSDVCQPSVRVQMPSAETEGENRNSNVDHKVVSVELLIPLRREDPNISLPEPEYLNVQSLGKNFVCLAWHVDEDQQNDVDEYLIEWKTVEEDWTISTTIKPAIPTGIVEGLIKGQKYQLRVRAVNGEEKSDEGSSTVWLLPIQEKSPPDAPCDLIVIGKVEKNAKLTWTIPSILNTSSITGYIIEVWENGVWKISSLHESVETEKRIYGLNMNKQYKFRIRAYNKHGVSSICNESAEQTAMRYPSTSKDDASGFARPNRPVTSGRKATSNITETIDEHKRKLKVVEKLQEGIQKRKQAELIAEKDMRKKEEASAANADRDGSTDSLISQLSSNPTTPTSNEKKKQRVSESPEKKLSIFKRLFSPRKNEENTAKFYLEEQSSRNETQSSASKDEECAESDDIQKAIFASLTDQKIQKTKRQKHKIIFDGTQPSTSRQGMYDPDDDDDDDTNSTASVTSGRRRRLSTNFAPVNEDSSCSSFTGKFKILDLDLRSCEEMLVDAEHEAMEIDQQQPATDSSLKKRKVASTDKGTPPVIKKAKKISRHSSPTAAGAKDRVTKLKEDKIKQVEKKVEGKRKQQPSKPTTSKAKNRGGNASDDDEPMIVDESSETCEEEGKSSKERMKESNKKKGKLKARIQKRKVQKSYAIYMSLNSILQKDDNNVMKNKIEHDVRNSSRMKILTAIFVNYLMNKPDCRLAEEYAITGFEHYRIMNCFKERTENVYNNCKKKDPELYQLFEEFKKEMADEENEIDQLLFKKFEELHGKKKWWQKNQERLEEYNKFRIEMLTIVNCKFETDLLLQASREMDKDLRVHLHQQGPKMLLKYLKFKEFGIPQQEESDKKKVPEKDKKLVEKKTKKNEKRLENFKKKGNQRKEENQRREGIIPTSEELKQARKNKQQSAREKAKAAYTKKPCKNQEIKKITKQLKRDENKSEKERERNQRERIRKKEEKIEKRKQKNENKEQIFTFKKSGKKECWTSKEMKEKNKNVEKALINLLIYDMCYDDTLYGYLEDIQRKTEELKEIRLKREKEKEEKKKKKVNQEQNDKGKKEKKLEKIEKEEVGLLNFQDLDIPHLCYKFLPLFMRMQRELVDSGAKGFVLFPMKRFGLHHATYTETVLERDVLNYLKNLTTESTEKEQVDKIREKLIKVDPTEREKEKNVAKLKKKYDNLKTLWEALFDLKKVKDKHKNKRACSVPRCMQTDGVKVSLIFDLKKEKQEEETLPSSGNQKKTKKKKKIKYQRFVGLDPGLKAMFGGGMREDDPHIKKDERTKKVDKKQHTLIYANTKTFRFRNGELRRKSLLHKYSKDIDERYNNFMKKNEKYNKVDKNDPTKYLLLAKFYLKQFEIKQDKLTERCFRNLKFNKLIMVQREMDRVVNFIMGDNVKKEPCFVAIGSTKINPCMKGHVKTPIMKIEKRLRERSKQVGEERLKVVSAYEGYTTKMCSSCNQKNIVSRSPKRYAFCQNCHVVWNRDVNAGINILNIALINEEILEAADIPNSEVFPGIISATDM

SEQ ID NO: 4162 - protein, 522 aa, Leptopilina boulardi
MKIIKTKLDNLLKYNECDNETLKALNLENLDFRDLKRRKECHKFLIFFHRLQDYFAREGIKSFILVPIMSPGLKYITYTNTALKLLETELKKVAPDYICTKKASEKFTVNEIAAQELMHKDIISPLKEKSKLLHAEKTGLERNFQYLEKANSPKNAEELSNIKNQLKEITKKLTPIKKEIQLENKRHQDIKNQRRPEKINENDERWNNMFDISKIKVNKDKLKFSKTIMTDGVAVSVIYNLVKPKNITNFSPLQQQESRDLTKYEVFKGLDPGLKFGFAGVERKMNDNFDIKCIDKHIKISTKSYRWQTQENKRQSILYNETKNYKKYYHDLQVSEKYRDKVNHKDPQQILISTEYLLTALKRNQPYFEKRKIAALKWDKYMSVQRETDLLANYMVGDVKRKQLLVIGSPEISPWMRGHVRMPLRKVVRRLIEKQSKYPNLRIVFIDEHRTTKLCSTCNENMDIFRNRTAYCASCKISWNRDVNAGRNILNLGLVKLGIINKEQLPNWSDFRALKNIQDWNE

SEQ ID NO: 4163 - protein, 679 aa, Leptopilina boulardi
MHNESKDKDGRLINLELSVDLNDETPQSFKTVAAKMGSAEQVQRSLEPTHCLKSIKIHKTKKNRTKSDSASNSSSSAECIDSDNSSTPIAVTKSATSKNQKRKALKSSPPLPNVTVKSGEQNGKSVLSSGNKKDTVVPGSSIPAAQEPIAPKIRKSRKISKKEKQEESFASLRDRDVTAAIIASPSADVDLNNETPKSRKTVAAKMDSAEQVQRSLEPTHCLKSIKIHETKKNRTKSDSVLNSSSSGCSDSDNLSPPLAVTKSATSKNQKRKRKALKSSLPLPSVAVKSGEKKENSVSKNENEMDTAVPGSSVLPPQNRIATKKRKGRIIVKEKKQECFTRYMSLNSILREDDVVNAATSANNDKDKNFMKTLIEEDVKLTSRMKILTAIFTNFIMNKPDCKLAKEYAIYGFNHYKIMNCFKKRSANSYTTCKNDDPELYELFEEFKREMIDEEDEIDPDQFKKFQDINEKENKTWSSKEEEIKAYNEFRIEKLMSIDCKYKTNTLKQAAKEMDANLRDHLYTQTPKMLKKYLNFKEFGVAVKEEIIKENSDFKKKNAEKDVAGHVKTPLKKIENRLRERSKQVGEERLKIIDTYEAFTTKICSSCNEEHIVSKSPKRYAFCKKCHVIWNRDINAGINILNIALINENILERGDIPNAKVFTGIQKMKRKGHVIQKQPQ

SEQ ID NO: 4164 - protein, 678 aa, Metopolophium dirhodum
MGSFDAISFRVFVCYASAVLREATNDDLYRQRRPSATSSYKICRVKNVVETITSGRHRQRVEKEYFRKKDGSLSRAAMRTFPHLPYKKMSESFVIKRDVAEVSALAVEASLYVHFHYTKLLHRSTQFSRDFTSNHLLDFYYHLQGKRQRKERVIRDEEYFGFRQKHGLFETVYDDHSTARSLEIVGNAVSEINVVVKTAIDLNKQRATNGQSDADERNSLDATKNDYSTIKLLWYRKIRKRKAENSLVGLLLDLNADKLWCGKILVCFGDGSLQDNMSYGKNLKLAVCSLRRAFHRRRDRCDVIDVDEYMTTRCCSRCAEPMPLPPRHTRDKDGRRRHNHRFRYCQKCGIHWNRDRCKEKLNTLAISVMNLWPNVRLRVIDGWVDRAGSSLHNEGRAVDITTSDRDKSKYGMLARLAVEAGFDWVNYNRRYIHCSCKSETKINTRTMGCFPGDSVVTTGAGVKKRMKDLRVGESVLALSNDGLLRPSEVLLFLDRNVTARTEYVTLVTDTGKSITATPTHLVLRWEKPERSQIRYANPVYAKSVRVNDTLLTVVNGDRGQLRLRAERVVAVSRTEKIGLYAPLTVDGTVVVDDVVASCYAVIDSQWLAHLAFLPVRALAAVRTSLYSLVWRLGHPLHDAPSLSPAIDAVQPADGIHWYPRMLYAISDYAIPASWMDTH

SEQ ID NO: 4165 - protein, 481 aa, Dreissena polymorpha
MKRKREHFTLWDAANVHKHKSMWYWWAYIRRKDMVNHEKTDCDVIQLLQSASVKKQKTQSDKFLTSFLVGLRPTKHQKQVLNEMLRVSNYTYNWCLWLVNEKGLKPHLFELQKVVCKTNASDVDPYYRMENDNWFFNNKMSTIKLTSCKNFCTSYKSAKSLKSKLKRPMSVSNIIQGSFCVQKLFIRRLSDKDVSIDNTQMQNRYICMMPDNFEKRSNPKERFLKLAKPITKIPPIDHDVKIVKRADGMFIMNIPCDPKYTRRNASNDTIEKRVCGIDPGGRTFATVYDPIDCCVFQVGIKEDKQYAISKLHNKIDHAHMHLTKAQNKKQQQAARERIVSLKKTHLKLKTFVDDIHLKLSSHLVKEYQYVALGKINVAQLVKTDRPKPLSPRAKRDLLYWQHYRFRQRLTHRTTNTECILDVQNEAYTSKTCGVCGTINKNLEKSETFYCDNCKYNTYRAVNGARNILLKSLRMFPFVNSQ

SEQ ID NO: 4166 - protein, 481 aa, Dreissena polymorpha
MKRKREHFTLWDAANVHKHKSMWYWWAYIRRKDMVNHEKTDCDVIQLLQSASVKKQKTQSDKFLTSFSVGLRPTKHQKQVLNEMLRVSNYTYNWCLWLVNEKGLKPHLFELQKVVCKTNASDVDPYYRMENDNWFFNNKMSTIKLTSCKNFCTSYKSAKSLKSKLKRPMSVSNIVQGSFCVQKLFIRRLSDKDVSIDNTQMLNRYVCMMPDNFEKRSKPKERFLKLAKRITNIPPINHDVNIVKRADGMFIMNIPCDPKYTRRNASNDTIDKRVCGIDPGGRTFATVYDPIDCIVFQVGIKEDKQYVISKLHNKIDHAHMHLTKAQNKKQQQAARERIVSLKKTHLKLKTFVDDIHLKLSSHLVKEYQYVALGKINVAQLVKTDRPKPLSPRAKRDLLYWQHYRFRQRLTHRTTNTECILDVQNEAYTSKTCGVCGTINKNLEKSETFYCDNCKYNTHRDVNGARNILLKSLRMFPFVNSQ

SEQ ID NO: 4167 - protein, 557 aa, Mythimna separata
MSSSCKTCGGVDHTRKSSKKCKEYLPPIRKRHLSDSSADLEIYTIKCGLVSVLCPLLDHEKRLKLLSEIRRDVRDLSRVYIELGVWINYYMKTAPRLPSSPDVLKFLYAMKGKGPYADAYRVMFEDRKFDDRLRSFVVQEMAKQYETVLHTNISTHAYSRLARYFRVKRNDPTLYAAFFKKELPVTNEEMRRVCTIINVDTLKGQKWWSTVPEWIKIQSKLEDFRLFPQPSHGLKHLIYTSRGWHELLRRVDPKSITPYWTRIVDHRRELWSPWLNVDMKKYGGSLQTDGVSVGLSMNRIQKKHDREPAKRTKKTYDRIIAVDPGSRIPIAAVESKRLEFRRITKKYVRSHTLEWKRERVRTRLCCASEAAERKAREKLDFPVSSKNSSHVFEYTVFRMTWFNVRQEPYEKHAKLTRLGLDKYIRTAKCQEKIVKEVFDGGGVESTLVLYGAGSNFMNGASFSGRKFKHDALLKRLRTKRNIDVEVVDEKYTSQACSSCNEKTGEFRKIVMNHRLRWGVCRNCNSEFDRDANAAKNILINHTRSAICRPGCSTSEAS

SEQ ID NO: 4168 - protein, 433 aa, Mythimna separata
MFGDRKFDDRLRSFVVQEMAKQYETVLHTNISTHAYSRLARYFRVKRNDPTLYTAFFKKELPVTNEEMRRVCTIINVDTLKGQKWWSTFPEWIKIQSKLEEFRLFPQPSHGLKHLTYTSRGWHELLRRVESITPYWTRIVDHRRELWSPWLNVDMKKYGGSLQTDGVSVSLSMNRIQKKHDREPAKRTKKTYDRIIAVDPGSRIPIAAVESKRLEFRRITKKYVRSHTLEWKRERVRTRLCCASEAAERKTREKLDFPVSSKNSSHVFEYTVFRMTWFNVRQEPYEKHAKLTRLGLDKYIRTAKCQEKIVKEVFDGGGVESTLVLYGAGSNFMNGASFSGRKFKHDALLKRLKTKRNIDVEVVDEKYTSQACSSCNEKTGEFRKIVMNHRLRWGVCRNCNSEFDRDANAAKNILINHTRSAICMPGCSTSEAS

SEQ ID NO: 4169 - protein, 1679 aa, Drosophila nannoptera
MARTPIQGFDGHLLRMTREQASLSRPDLAREIGVTDQSLKMWEIGGVSPSPKVYVRLTDYFGKDRWFFAPVPVSERTLLDYRQRAGISSPELSRCLGVPVARIRTIEDGERPTLTADQIARWAHEIGISVAGWYQVHLQRESSDPRAHCASARDAFLGVSVTTAVTGSVNTAGHRPTSTLSGRPQSCTTKTRVHRTRRVCTPRLGGELVGVALRLLDPTPSTTSDGSDAEDRDLTPRTTDEWDEVNEVAKSLAGITNCSRMALHARHRRGEIAAWNRVIELPPDYAAAVDQLEATAPAMIAELTESRAELDPAITALNAHQTSPTSWSLPVPDDADRGVWAGRDHWLACAEDACDAARERDLRPLQASPHTTRALLRARADFFDVNGRGCTASAETIVTRAIERHGATIAVSTGLTRLRAINRVLTDAGLLTVHNYGRHLRRIERMAATTWHGHTQTRAGSVVDATLPPELRPTPSPTGSADGRPAWATGLADRLAARDARHGVRHTTPTDPVDNPQHPATDEHAVNCGNPESSTYSVAYGLLSPSGSRRGAHASAQARADTERLHQTRPKNGEKTAKSARRGRGAQSTVISLRARRIADDLTRHDTTNPLASGPYAHLCGARPSADGDKTPQMTVTALARLIDRLTPSWAGTRDVLAGLVHAATSPTTGYVALGLHTRPTNPIAWMTTVLSRIDWTHPDDFPAWWKVTEAHGLHCITPTSTGSGDQQEQEGAEHAMTTTPTPATASHGTPSPDTPVRLRGYRYRLSPNDRQQAALAQLAGASRVAYNTLVGHNLDAQRRRRALHDRLTADGVDDKVAWQQVKTAAKTDDTLQLTTSYQKAATTIIGPEITRHRDAAHRIAAGEAPDTVWPDTERYATPWLHTVPRRVLVSGLQDAAKAFRNYFDSLTGKRAGRPVGFPRFKRKGKARDSWTIPRPEAMGPKDAERGIYHRSVDGHAGPITDYHHIRLASLGVIRVESSTKRLSRALRRGAELRSFTISEAAGYWYVSLLAAEPDNRRVEPTRRQKDGGAVGIDLGVSKLMSFDNGTVIDNPRLLAQDDRRIARTQRKIDRAVPGSVGHDRLKRRLARHQHRLAARRKGLIHETTAALVDSTTLIAIEDLNVAGMTASARGTIDNPGKNVAAKAGLNRSILDASFGEIRRQLTYKAPEHGVDLVPVDRFFPSSQTCSQCGSKTKISLATRTYRCGTCGMILDRDVNAARNIINFALTTRANITTRRFTVIITVANTKGGVGKTTTTIYLAEAFARQGLNARVIDMDPQGSATRWYDYAVEAGEPAWTVENLTEYRLKQISDSERPTIIDCPPGDPRIFTVAVNLADIVVIPCKPSPDDYDRTQITYDTVPDGKAVVLVNDARLRTRALDQLVGDLDNPSDTTREPFQRFDTIVTHREHVVHANGTVPDRLNGFDDRNAHRDESPAPTSELLPKAKDDRVILGFRISEDKRRAFRTKATQEDTTVQAVLTEAVDRFLADDTVQPNKRAETTISIEGLPRPQQIVIIWSHNRTPDALAELTAGTRVIFAAKEDTLTQRTDDDETTGAVVTVLVAVGLFYDIITDDRDATDIYTSIEPRPLTFSGTVATVETVGKNRGITLVMPRHGQAQPIETRWPADIADSVVDIRPGDEITVEAGERSLSWRVSIDDLGRRAVVPVVTATALATSTILS

SEQ ID NO: 4170 - protein, 971 aa, Sitodiplosis mosellana
MSRDTAAINLPWIEKYRPSSLNELISHDEIIATISKFIEQNQLPHLLFYGPPGTGKTTSILACARKLYAEKDFQSMVLELNASDDRGIGIVRGKILDFASTRTIFSKGFKLIILDEADAMTNDAQNALRRVIEKYTDNVRFCIICNYLSKIIPALQSRCTRFRFAPLSEDQIIPRLDYVIDQERLKVSDDGKKALIKLANGDMRKVLNVLQSTWMAHKNITEETVYLCVGHPTPSDIKTIINWLMSVESFQECCETKMPKRKGTPLRGNQRKKKKIVSKTGIEGEIGILAIKMTLKAIVRPQYYQQVKDWFTQKSIECTKICALASLLFLYKVKSANESNNADFFSGDGNKEIKDCFYAVLQKNKEKEEMVPDFRDFVENMEAENRFSWPGNSFFGNQMQYLYKQYTTNLRNNLEMHAERRLYQYLIMRAWQFNAVSTGLTLRNDDIKRAVQWTIDRYDPIKTTDRHWEVKWEKRQLLLDMIAEIGGPEDNDVAIYTTSEGTWFKSINMWLTMQMEVDNFHIWAEENGIEIPKIKNLKVIPIHQFMRQHVKMETDVLIRMMSEMRFRLHGLIIRYEIVEDPMTQCWDEIFDMPKIHRLLKSNKRFRPYIASNGQAVSIMYEVPKSHLDRLVDDEIVRKRYRDGVYVYEIGIDPGMRTWNATVRRNIKTGKEINFTVSSKRYHYLARQGVRDRKAKRWTRRFVAEEQHDRERYQRMPSPKGENWGSYIAHRLTMLKKGIETYTTEKYARLQFDKYIQSNRATDKIANLLTNRKPSIIHMGAVDMPANSPIRIKKHVRCPGNRKLAKSFRKIPNTVVRQVNENRTSQLCGRCFTPFDIATQRDRMKVCEWCLPDNDDWPPNLQLPTKIVSKKSKRTLIADRQRMREAVEQDPNQAERFVSKVISYQKNWQQSAAIDEDADPAEQEDAAESHDRRILKTCWHRDITAAKLILYKGHCHLFGIQLHFMFTIERIR

SEQ ID NO: 4171 - protein, 626 aa, Sitodiplosis mosellana
MCFQGVLRQNYTNDRMFMVPGFRQIVIKILGEWFPWPTNRFFGNTFKYLYEQYATNVKTNLKTHCEQRLRKFFKMRCYELNHMFLSGKIQLDELFDGDDIKNAINYTYNRRDSTRGNANAIRKLEILLAELYWIGAPHRPDDPHPFNIREFVELNWFQALRMFINIQRDIHNFHLSFANLRQSWNLFRKYPLYVQQPEFPEPPEITTFTVIPKCTFQRRHVKIDTDSLYNILKGIKAMPRTKGTRVLRDGEYQERWISQIEFKERGGWSLFFNMDEIIKLVKNKKEFGDSIISDGVSASVLFKLPKQSKTVADEDEAETKRKYFANEFAYALGIDPGMRTFIASVRLDLKTGEETNEKISFKQYHQKSKQDARNIKAEQMTRVFTYDEQADLKRIAAEIGQTPSPRNISWRHYIEHRLRMSQDGIAAYSQKNYARLRLISSPYVRCPGVRKLIAAFKRRGNCVVRLVDEYMTSQHCARCFKRFPIWTKSKRYKKCNDCQPDERVGLPRTIYTNMSKRVLQMQRKIMRTWEEMRDQGDAIAAILTQRNSGRLVSKKQRFFKTWQPNAAENAGTEDAAQSRKLLKSLWHRDISAAKLIMYKGLCTLLDIPIHPALLRRPDDDGVPLNP

SEQ ID NO: 4172 - protein, 397 aa, Sitodiplosis mosellana
MKHIKIFICSIQWHANWVPSSWQKDCLASRLTSPEMYENGVFRFVLGMDPGVRTWNATVRKHIASGVIENITIDGPKYHFRAKYGKRKRKSEKWLRLFTELEQHDRNQYPFYPSPKGASNWMSYIEHRVKMLQPGMEVYTARKYIRLNLDKHIEETRASDTIAAFLTRKLPSLIFLGAAQMAPNSPIGIKKRLRCPGVRKLLNSFKKLHNCVVVMVDEYKTSQTCAKCFRPFDRRTKKDRYKVCRQCIPHAANITTDKHLSSVIISKKSNRSYQRERRHVVAEYERLNVHPVYSHGLVPKLNVWFKNWQLNTDNTWNDSRHPHQQNTVWHRDEVAAKCILYKGLCMIKGLDVHPQLSRQHHAAAAAAQNNAEGDQDDNDSDSDDDYVYVLDDVSDEE

SEQ ID NO: 4173 - protein, 844 aa, Sitodiplosis mosellana
MRLKEAINLAEDRAENFLQTINQVVDEMSHLVKLAYLNVHCKLMRILTSGNVQTIENEFWRRGGCNRDYFNKCFNGVREGGVDPSKQNPRTPFHFELDKTVEECIQDFKIKAPPTIGFQSIFNDAFKLYRTMFMNCICVHGYKWIQKLLWHFIYIDVIYNDGNVFKLPADVQKPTTIKQMKYNKMYRQWVQLAMRHLKPPKDEVVQVAPPLNENKARKLIEQLNDKLQPINFNIKNHGYNYFKDLHTSSMSGGPWYKYVPFFYTLQQYNRTQNEDRARRLTEHIAAHENEMETETEIDNNQRRSPHSRRRRRRIPHLLLTPRLKVFQVFPESHFGRKSISASHTGFHKLLRLQNYPDEQDIANAKARAGEDPIVKKRFRELWRKYFKVDEIEGKHDAVFGNHIYTNGESISFLMHRRNNNKEQQQQNVNNEARTKRKAVDDDDDDDDDDDDDDDDDDNDDNDDAAAAAAAAKKQKENRRKKLQECNREVVLDVGKRLMICGVIIDHTTGDYRHLKFSSHEYDRMCKKQVFKKQREAITNQIDDEMKQDREAIAKTSASNLQPSSRSPDFAAYARHTLKYFTRAMAAYGSKEYAKIDYDAWAQTRRTLVYIARMIVGRSKDVVVIVGDKLPGANSLGFGYSGTQVHGLFKLLDEHPHCTVYYGSEHRTSKCCCRCGQVLLDARMGESRSLAEKEDRRPRDHGKRTEKSRTKVCLICKPMDLKGMLPMMRSPLPEKTIYVLKNKRELQIEREAANQGQSHPKNQKYAHLEKITWKSKHTISKTTGKRVRRRKTKWRMRQIDNDDIDVCFSIWKRHQFNGAYALDAVASRSLNRDINASINIRTLCK

SEQ ID NO: 4174 - protein, 506 aa, Sitodiplosis mosellana
MKRYDGTRGDADRLAKRDRLLLYVRDIRGPADDDIAKFTKDEDTWFASLPMWLIMQSEIETHLNWVEQHHDNIVQVIALPNIKNLVVIPICHHTRKAVRIDADVLYRMMCGTGTIPRDEYGLQHSGSDVTSKSNQAYYFNMIFNMEKINRVLKANKKFEHILSDGVSASILYTVKKTVVDKLVEDGLVRKRYSDGFYVYELGIDWGMKTWNATVRRRMAKSGFIMAKSKKYHYCTGDGVRKKKRERWTRAFGQFEESDRNNRARYDRMPSPKGSNWRDYIRHRFTIMKKAIAVYTTEKYTRLSFDHYIESNRVSDKVAAMLTNRKRCIINIGASQPPANSPIQIKKHVRCPGVRKLVKSFKKMEGNVIRFVNEARSSRLCARCFEPFPLSTLNDRVKVCEWCMPDQDDWPDGMKLPEKIVAAKSKRKLRSERRAMRQAAVQNPNQPRGFVSKVICYRKNWQQNAANGMDDNVEERRGVIIHDAELGIIEYTDEFVPEDQEMTTLQY

SEQ ID NO: 4175 - protein, 965 aa, Sitodiplosis mosellana
MTVANPEWKNNVKEHIPNDQGKMPKLTQSMLKETLDKMWSEMEKYVSTDDELVRSLNFPSINYDVMNELRWWTKGSSAFLGDKIINAYLKLICERSSKGDGLPKVYAMDTYFLPELHRDGKYNYDHVRESTSDTDIFTCDIILVPVHISGGTDGGHWCMAIIDMEYRTIKYYNSMGAPNDAVLTNLLQYLKDEYRDKKKEEFDMSGWQKENVLGLNIPQQDNGYDCGVFSCISNLVSMKRKRAQNGRPRSVKLSLNSVLRDQYRANFVAQVNNWCHTATVITVLASLLFLFENNRAFDEDNHGFFSGNGYELIKDCFKNILNENRHKLPLAFRQIIEAAVPNFRWPQREGMGNAFNQLIDQYTTNVKNNIKTWCYTRIKTFFVLQRYELNLLGHNISDIDVKNATKSVMFNNIVPSANVERLLEQARMIGIPVGTKLCDLVRGSWFQTIPIFITIQRLVFNHHERYELLNDLWRRYYRDRLHNAIPSIARPPKIKNFRVIPIHDFKMKHIRIDIHLFYQMACKLGAIKLAKGLFGQPVNISKKVYDSNPFVSWDTIFNMDKIQKVGNRKTFDYTIVTDSVAVSLCFLKPECLSHEYSHEQINEMYENGVFRFVLGMDPGVRTWNATVRKHIASGVEENITIDGPKYHFRAKYGKRKRKSEKWLRLFTELEQHDRNQYPFYPSPKGASNWMSYIEHRVKMLQPGMEVYTARKYIRLNLDKHIEETRASDTIAAFLTRKLPSLIFLGAAQMAPNSPIGIKKRLRCPGVRKLLNSFKKLHNCVVVMVDEFKTSQTCAKCFRPFDRRTKKDRYKVCRQCIPHAANITTDKHLSSVIISKKSNRSYQRERRHVVAEYERLNVHPVYSHGLVPKLNVWFKNWQLNTDNTWNDSRHPHQQNTVWHRDEVAAKCILYKGLCMIKGLDVHPQLSRQHHAAAAAAHNNAEGDQDDNDSDSDDDYVYVLDDVSDEE

SEQ ID NO: 4176 - protein, 871 aa, Sitodiplosis mosellana
MGKSKFWGKLVDGALVGITGYEVGKERGEAKYEGTQPIQPVTQPRTEVHATGANDLVIVLIGIILVLIVLIIAKYLVSKYIKRTINQNHFNQFNGLPLHPIEKHIRTMANRFKPSIPAEGETKDEITTIKCALKTIIRPQYQQALMSKITDLSVENNDFALFGGSGEDKIKLCFEQVLWHNNQPPKPKSTYKPRGEKPRGPRAELPRIDPEFKAIVEGLDDYHRIDWPNNKDFCNGLKHLTNQYTDNVVTNLKTHANKHITQYLKLKVFQWNSDVGDDAEKFLPSDIASVVNLIVKQKDIKVPIRDPNKLERCSVLYDMVNDLNVFPEIDLHDLTTDPKHWFKAMPMYLSMQREIEEYNSEWPHQRRPKRKKRKRKKTKGKWKRKRSQMLDNPDFRPLIRNLVVVPMCDFRRTHFKIDCSSMHQVLSSQKLLPKVEIENKKGTTSTKTIQQKDFNHSRDYWWNQYFYMRKIRRFVRAKKQFDYSINTDGISVSLQYSAKKKTDNKEIDQKSRIIQKIEDGTIKNYSGVDTGVRSWNTTTTHDIETGKETNFVMSSKQFHWQTGQKVRNAKAKRWTKNFVEMERADRENRDLYPVMPSPKGSTWLNYIKHRVKMMKHGICAYSTAKYTRLALDKHIKSSSVVDEWVNKVTDKKPTLFFFGADGEIPPDSPISIKKHVRCPGVRKTLRSIKKRRDCFIQLVDEWGTSQTDARCMNRFQNQNKAARFKKCRCVPDARTLLPTKIVSKLGKTDLSIYRQLQRAMNEEALVGDERLFPKVKCYYKNWRLNLECSVIWHRDVVAAKNILLKGLWTLLGLPIPEAINRYWREAAEAAAAVAAAAAARATAEAAAAAVAIVDNDVEMFENDQQPADHAV

SEQ ID NO: 4177 - protein, 1515 aa, Sitodiplosis mosellana
MTLVYVLIITIFAVIQPAVGDAEWMNDCGVCHCKWISSKKQADCKNTSLISVPREMSVELQVIDLSFNIIPELRGNEFKDANLPNLHKIYMKNCTLQEIHRDAFKGLHLLIELDLSNNFLKVLYPGTFTDVIRLRVLIVTHNQLEYLDDNLFENLGFLAKVDFRYNELKSISQHTFVNVSAIREIDLENNQLTVLKEESFRGMDNLRSLTLNQNPWNCTCDLQAFQKFAITRGLYTPPTDCHLPMNLRGKLWTDVPAENFACRPVILYPHDGFTIDANTENITISCRLKGSPKPHIDWLYNNRPMNLEDQRISIRDTQDENRRDSIDYYVSELHIVGVKTEDRGTYTCLAKNTGGVSKVDTHVAVTSVLESVDGMGMGIIGSTAGVPTNNSPNLLFIVCLVAIVLLTLLIIVVLILCCYCRRVKTYSKNGSISENGLVASKIDRSTDGSMLEGSVIMEMQKSLLTEVNPVEKPPRRSETDGKSIPSDDVQEIKKTLLDEQSYGHHEDETHSIALSDTTPRSRATFVDDGYGTNLPPDLLSFPSRYPPSSSTQSSITNIPEGNLYIKSPIASPIYQHNAYAAQQAGYRTLQHPKNRNLAIINPRTSSPFQPAPILYAPIMMKQQGYVTIPRKPRTPSWAPSITSTLVDFPPTSPTSTISTELAIDPIYDNLGLRTSASGHSALSVKKQQQLLLQQQHNQPMAVSVSGSLDHIGAGPSYTMKDRPLPATPRIYEPIQEQQQIFPNGGELCGMNDETELLFNKSIEPHPIIMGYQRKKAKKKGKPIAVLGDVIEEDEKEKDSGIRTVKTQLRAILRPEYRDLLIAAITDRSMMATKICALASQLFLFRCERAFEDNDKGFFEQNGEKVIRSCFFGVLKKNIYKKKKMPPEFRKMVQQLDDSHRVVWPNADYFGNGMNDLIDTYVTNVKNNLKTHSKKRLREWLRVKVFESSLVARYEQADIDRVISLAIFGNDDITINGMDDVAKRERRTLLIGMVTKNSWWDIPDNNIGRFTNGKDWFKSIAFWISLQRKIDDFNTCEEYREERRCQREEFEELKRCRRRNHRPCTCQQPVDRGQNGNEYIEKGPPRVKNLAVIPICSFTRTHFTLDIRTLYFLLRQLGIVPLNITEDEFRKQKEYYWDQYFDMRKIYHLGRSRKKFRFRILSNGQAVSLQFDIDKTKLKPVDKKAIVQNYKKFVNEGATDPGVNTWNATTVHNIATGKEANYTISSKQYHYWTKQTVRNRQGKRWTKGFVKEERQDRENRALYPVMPSPLGRHWEDYIRHRLKMTERGIAVYTTDKYTRLNFDKYVRANSVTDSIAGMLTNHQPTLMHFGAAQMSPSSPIGIKKSLRCPGNRKMIRSYKKCRGCVVNMVDEYYTSQTCAKCFGRFDRRTKRHRFKVCHDCRPQSVVRAMLPSMIVCKVNKRKMRHEKLKLFLLEKEAEEGNGNPAVGNDVPHPDQLNPELLPKVAIYHKTWHVNESSGILEYVKFNSAGEMEVVEPRLHKTTWHRDIAAAKCILIK

SEQ ID NO: 4178 - protein, 2212 aa, Sitodiplosis mosellana
MYEYIQKDWFESLWIWMGMQRIVEKFLIDTAHLREQWKAYDRDPVNNREPSVPKIPKVKNFAAIPLSDTKLKHIPFDHIDLIDIIGQLRNERGWDIRADYRTYYKQGENKDEAWGIVFDIDKIRRLRTGSKEFYHKIQTNSSAVSVLFSRPKRKDPGVTLSEIKAKYEKPVSKGGYKYESGIDPGQKTKMACVRRTLATGIETNIKLSSIQYHWGARQGMRDKQAKKMTSKYVHKEQRDLKSYPITSVSPRGSQWKSFIKHKIKMLIDSLATYARRKYAQLSLHKYIESNREMDLMAKHITNNETGVVFLGDAAFPSNSKIGVKRTKRSPDQRKFIVSLKKNGKTDVVLTPEPYTSQTCANCLRRFPRSTKSDRFKVCKDCRPHKDVRLPPVIVTDRSRRRKQRDRKQNASQKPTANVTRGERAEKHREERRSERESHNPEQLDTEEAVRRYNRRIRRRELRQRRRVAGHRSRKVTKQPEAESDLPGFSSGNTPSADLIDMTQMDANNAAHLSSKQQHNNANAQIQQQRAALSAAEKHLKMGPNSSQQITAAIIQQQNRAIAQQNLEKFNSMTPVEKQRLFKKFDKKQFDAPMLHSENNLNRSLERSIQPPQLPSRSPQIPMNTNAPLDLQQQSKPQISHKQSQQLNGAWNSYSAQQQSLPNLSNRTDIGQTTITLSNLNAHQSSHTQPAMPPQIPAAHNQSQVQSMQTQQNYQQQHQQQQQQQSQQQPSIGQENIVRVFDELMKNIARMKMFVRPSMCKPYGKQSESLQKNTESVGDLNDAASVASSGSMKSCKVLLRRENFDDMNTNTTAEDRLVAHSTRSRRSSQLTEENVSAVYSSAPRRSLRAGSVISDDTESTQISRPRSARLAQSQNTPKKDSAPRPSTSARRSSRLLSENEKAAESPAKITPARRNTRSSVASEDQLSPTRRTSSRLTESQGTPKSLKTKASKIKVEPTTPRRASMRVNKSIIATDIIDEEPTDEEFDETVIEKPSKSKQPVKLRESLIIEVDDEDESNGEKKEIESNATKDGHKRKVQADDEPIVINEPELVDVNTIPAEERKSATKEKVTSSSDLVKSPRVDASIKSPILKTASMPMSPVVLITTTTSHSPKLKTSLPEAQTPTFEPVEPMEMSMTEAIEPTGTPKGKPQKIVEISETPQINSPKIKAVASDLDSMDVTAMVNESILSPAPIRSKESRRKSNVSVADTTQTGSDTIESDKLDDSQSNQASSANVPSIEPEAKDDVEEMEVDTEPAPEADKESSTPKSKASTSNANESFDVSPLVQEDEKLTPTPQSTKKSSKRQSLNDTVQSTGFDQMEVTILAEESTKKTKKIKSGTPKDSPKPTAKDTPEKAKTPKSSAKTPQKEKSIDQEDEEMFDDTSEMSKTKTPVMFRPPRESTFGGMSVSLSEAINNLVAEIVSELTPTTSKADEPQAIDEVQEVTTEKNDTTIGKVKEESVIVEPDVSVVDETQAELDSSTPMNEAPPQKSTAPSSKNERKSVQIMTPVGDKNQKMLMKRIDTPYPGEKSITEETAANRSKSDERNKKREARAEARENLQILRDSWSKSIKRNSLSNEPSKPIDALGTADTSSKIDEQPAKKAVPARNNWKGLVDSESEPEEDELIPESDEGSDNEGEEEEESGNEFVDDVVEVIEDYESGDSMDEEERREREENEIDEGQYIGSDDTEDEDEDDDYEDDGFIVDEGEETDASLSEEEEEIVVVQKPKRRASRIIEPSSSEESDGESIADSNDIVAVSVELVPESVVVVHRNTSDAEELVEGKTFPTTYLMPMEEDEVKSTKTTKPVRSSAEEAEANRTLDEERQIEETRQENKVSAQAVEPATSSNANESVREKRDDIMFDSDETASDKAIEQKETHIEKIETTLQPTALSDGKENQTAARKPKKIVVKHRASLPGIDRLPKSSIVKKNSRASLGDLNPIAQNVTITQLKTQPSKAKASEKSHSQTKNHVSMSNNGIAVEQDETPTANVSLRAKDSKNAALDISAEENNNNEKASKKGITIELLVAVVSEASEKKSKFKRKFIEIDIDEEVQVRPKSKKLLRIINTASGQFIEEPMTPEKKNKFGFREAPRTPVNHDFKVQKRVQFAQPGRSNKRKSMYLNEDEEVDLLLPRPKWKINMQFEAEQPKKRPRKLDLGSTEVILKPLEPKKRKKQTYLVPVELRRYRHNILNRAGIPRQDTRALLRERQKRMAYK

SEQ ID NO: 4179 - protein, 985 aa, Sitodiplosis mosellana
MEQIVITDCFQLCHIGQHQRSTHSPNARRHSRYGDTSEQSRAVGTEIPKVKNFAAIPLCDTKLKHIPFDHKDLIDIVGQLRNERGWDIRADYRTYYKQGENKDEAWGIVFDIDKIDAQNRPKRKGAGVTLEQIKAKYEKPVSKGGYKYESGIDPGQKTKMACVRRTLATGIETNIKLSSIQYHWGARQGMRDKQAKKMTRKYVHKEQRDLKSYPITSVSPRGSQWKSFIKHKIKMLTDSLATYARRKYAQLSLHKYIESNREMDLMAKHITNNETGVVFLGDAAFPSNSKIGVKRTKRSPDQRKFIVSLKKNGKTDVVLTPEPYTSQTCANCLRRFPRSTKSDRFKVCKDCRPHKDVRLPPVIVTDRSRRRKQRDRKQNASQKPTANVTRAERAEKHREKRRSERESHNPEQLDTEEAVRRYNRRIRRRELRQRRRVAGHRSRKVTKQPEAESDLPGFLDGCTEDTSNSYALECFKSFIGTTLRMECDEAIAKNLSKVKLFEPNTSVNINELVKQMMPGKCFTIDDQSKIPTPIGDNKELTVIDHTKLKEGYNLITFVEQSMNLKYYRQRNQTQNIAKIIETFPPYLPCEDELCFVKFNDFWYRGSFDKKASDTTAIVLVLDIEKGVEVELKNIRKITHDFAHEPHLLFSAALHGYGSKISKEQADGLMKKFKINDDVHVKKETPIENAILCTSSDVPSASGYESPTPSKRNLDKPPPLHRNRRFKKRIKEYHTASSSSDDECETQHKSYNLRRTRCEGSPSQSKNVIKPESKTVQPQEYSGRMLRKRIVEEAKTSPTQDDRSSSPMKRSKKMLDSINDTCGGASSSSMGCTSAGDFSKPYSELKYLESIGSIRTIRRAKHPGINKVPSAKAITATPFVSPESQNGWDRKTKLKISYRTGLVKTDVQYALIIYEPLTMITRRNLLDEFEKAAEEEQHQNKSSSKAPFSSPLGPMQNPRESINLKTPTIRTKPKNDKVSSLRRLRF

SEQ ID NO: 4180 - protein, 670 aa, Sitodiplosis mosellana
MAQQSATKTEVKAIVEGLDDYHRIDWPNNKDFCNGLKHLTNQYTDNVVTNLETHANKHITQYLKLKVFQWNSDVGDDAEKFLPSDIASVVNLIVKQKDIKVPIRDPNKLERCSVLYDMVNDLNVFPEIDLHDLTTDPKHWFKAMPMYLSMQREIEEYNSEWPHQRRPKRKKRKRKKTKGKWKRKRSQMLDNPDFRPLIRNLVVVPMCDFRRTHFKIDCSSMHQVLSSQKLLPKVEIENKKGTTSTKTIQQKDFNHSRDYWWNQYFYMRKIRRFVRAKKQFDYSINTDGISVSLQYSAKKKTDNKEIDQKSRIIQKIEDGTIKNYSGVDTGVRSWNTTTTHDIETGKETNFVMSSKQFHWQTGQKVRNAKAKRWTKNFVEMERADRENRDLYPVMPSPKGSTWLNYIKHRVKMMKHGICAYSTAKYTRLALDKHIKSSSVVDEWVNKVTDKKPTLFFFGADGEIPPDSPISIKKHVRCPGVRKTLRSIKKRRDCFIQLVDEWGTSQTDARCMNRFQNQNKAARFKKCRCVPDARTLLPTKIVSKLGKTDLSIYRQLQRAMNEEALVGDERLFPKVKCYYKNWRLNLECSVIWHRDVVAAKNILLKGLWTLLGLPIPEAINRYWREAAEAAAAVAAAAAARATAEAAAAAVAIVDNDVEMFENDQQPADHAV

SEQ ID NO: 4181 - protein, 452 aa, Sitodiplosis mosellana
MHQLDDNHRVDWSNADCFGNGMNDIIDPYVKNVKNKLKTHSKKRLREWLRVKVFESSLVARYEEADIDRVILAIYGNDDIEINGMDDVAKRGRRTLLMKMVTDNNRGQHEYIEKGPPKVKNLTVIPIRSFTRTHFTLDNRTLYRLLRQLEIVPLNITEDEFRKQKEYYWGQYFDMRKIYRLGRSRKKFRFRILSNGQAVSLQFDIDKTKLKPVDKKAIVQNYSKFVNKGGTDPGMNTWNATTVHNIEPGKEANYTISSKQYHYWTKQKVRNRQRKRWTKDVAKEERRDRENRALYPVMPSPLGRHWEDYIRHRLKMTERGIAVYTTDKYTRLNFDKYVRSNCVTESKAGMLTNYQLSLMHFGAAQISPSSPIGIKKSLRCPDNRKMIRSYKKCPGCVVNMVDEYYTSQTCAKCFGRFDRRTKRHRFKGNSSVGNDVPHPDQLNPDLLPNIAI

SEQ ID NO: 4182 - protein, 225 aa, Sitodiplosis mosellana
MCGQKQSKTAVDEDKAETKRKYLANEFVYALGFDPGMRTFIATTNEKISFKQYHQKSEQDARIIKAERMTRVFEHDKQADLKRIAAEIGQTSSPRNISWRHYIEHRLRMSQDGFAAYSQENYVRIRLDKHIGWRRAIDLIAGKLVHFKAAIINIGAAEISPDWPIRIKKYVRCPGVRKLIAAFKRRGNCIVRLLDEYMTSQHCARCFKWFPIWTKSKRYKKCNDC

SEQ ID NO: 4183 - protein, 866 aa, Sitodiplosis mosellana
MDAMRKKKSLFAEEIYQSDKSNSRIYANDQLSPYFADLFQCARRAKNDGLIFSVSSLGGRIRVKKFEHSQPYTIENKTQLNDVIATVERTEKQINPPEMSPRSQETNDTAKKDESPQSIDSVSAREIRGKTFTHNRQLSHRNRPSQSRQPSSSAPNSTNNYNSIGPYREQYQKRNSRHPPKPKSTYKPRGEKPRGPRAELPRIDPEFKAIVEGLDDYHRIDWPNNKDFCNGLKHLTNQYTDNVVTNLKTHANKHITQYLKLKVFQWNSDVGDDAEKFLPSDIASVVNLIVKQKDIKVPIRDPNKLERCSVLYDMVNDLNVFPEIDLHDLTTDPKHWFKAMPMYLSMQREIEEYNSEWPHQRRPKRKKRKRKKTKGKWKRKRSQMLDNPDFRPLIRNLVVVPMCDFRRTHFKIDCSSMHQVLSSQKLLPKVEIENKKGTTSTKTIQQKDFNHSRDYWWNQYFYMRKIRRFVRAKKQFDYSINTDGISVSLQYSAKKKTDNKEIDQKSRIIQKIEDGTIKNYSGVDTGVRSWNTTTTHDIETGKETNFVMSSKQFHWQTGQKVRNAKAKRWTKNFVEMERADRENRELYPVMPSPKGSTWLNYIKHRVKMMKHGICAYSTAKYTRLALDKHIKSSSVVDEWVNKVTDKKPTLFFFGADGEIPPDSPISIKKHVRCPGVRKTLRSIKKRRDCFIQLVDEWGTSQTDARCMNRFQNQNKAARFKKCRCVPDARTLLPTKIVSKLGKTDLSIYRQLQRAMNEEALVGDERLFPKVKCYYKNWRLNLECSVIWHRDVVAAKNILLKGLWTLLGLPIPEAINRYWREAAEAAAAVAAAAAARATAEAAAAAVAIVDNDVEMFENDQQPADHAV

SEQ ID NO: 4184 - protein, 665 aa, Sitodiplosis mosellana
MYEYIQKDWFESLWMWIGMQRIVEKFLIDTAHLRQQWKAYDRDPVNNREPSVPKIPKVKNFAAIPLSDTKLKHIPFDHNDLIEIIGQLRKERGWNIRADYRTYYKQGENKDEAWGIVFDIDKIRRLRTGSKEFYHKIQTNSSAASVLFSRPKRKGAGVTLSEIKAKYEKPVSKGGYKYESGIDPGQKTKMACVRRTLATGTETNIKLSSIQYHWGARQGMRDKRATKMTRKYVHKEQRDLKSYPITSVSPRGSQWKSFIKHKIKMLTDSLATYARRKYAQLSLHKYIESNREMDLMAKHITNNETGVVFLGDAAFPSNSKIGVKRTKRTPDQRKFIIILVEGPIAAGKTEFAKKLANDLDMYYLPQACMDDVYINEYGYDLRDLDVKLPPGAQSFDEKKFVNDPTNRLTAAFQLNMYSLKFSDYIDALAHLFSTGEGVVLERSPYSDIVFVEALYKCNLITKTTYKGLIETRNNSLPEILKPHLVIYLDVPVNTTLEKIKKRNLHNEANSPLFKDTKFLETIDEVYKRNFLKDISSHSELLVYDWSNGGDTELVVEDIERIDFDSYEKESSKMRDWRFFRVEADWCEARMKYTEDRHITFSYANLPLFHCPDLCIQPEDNMVRNRIYEEAKGSKYAYGYDVELGDKDILFKTKHFNSPKSKHWDF

SEQ ID NO: 4185 - protein, 394 aa, Sitodiplosis mosellana
MPVHDFDLKHIRIDVTHFFKIARNLGALNHAIGKSGRKVYIEKETYNKNPAQWWKHVFNMKKINKIGDRKMKFDCSIVIDRVSVSLMYIKSNRTLDAKDLKTIEQMYRDELFVYQFGIDPGVRTLNATVRRTVAIANEKTSHCWSSNHWRAKRSKRRQKEERWQRTFKEQQQRDLRSYPVVPSPKSKNAWKSYICHRLTMMALEIAVFGTRKYARLSLNTTNTWRKNCRIVNEQKAINDLLGRSTNGTKLTDWNQKTIAMPRHKKIVGFKKLSNCIVRFVDEYFTSQTCAKCFGRFDPRTKRNRFKVWRQCWLNGYDSQIMPNKIVTTLSSRKLKKARKEEKDERMQQNVNNNQPRRCEVFEYRIHPNLSRPVQQNEQNIDSDYEHISEDEDDE

SEQ ID NO: 4186 - protein, 586 aa, Sitodiplosis mosellana
MTLYQVLKEEYRDRFMARIKDWCDAATRISYLASTLFLYQAESAVDSNDEIFFAGNGNEIIRQCFLSVVDGNHVRLPDEFLMMIQQHQPNLVWPERNGMSNAFNYLYEGYQTNVKNNVRMWYVTRMRAFLRMRCFEFDHGRLRYRKPANVGIFDETDVKNTTKFLVNQRDWTQGNADRYRKMQFLLSEVVRIGGPADNNLKEFVTKKWFASLHMWIKIQRNISYFHTTYGILNSDWAKYKSDRVTNKMPLVPRPPKVKNFIAIPVHDFDLKHIRIDVKHFYEIARGLGALKHAIGKSGRKVCIEKEVYNKNPAQWWKHVFNMKKINKIGGRKMKFDCSIMTDSVSVSLMYIKSNRTLDAKDLKTIEDMYREGRFVYELGIDPGVRTWNATVRRTVATGDEENITIAGPTYHWRAKRSKRRQKEERWQRTFKEQQQRDLRSYPVVPSPKSKDAWKSYICHRLTMMALGIAVFGTRKYARLSFDKYVESTRASDKIAASLTNKKPSMIYLGAAQMAPNSPIGIKRRLRCPGTRKLLASFKKLNNCTVRFVDEYFTSQTCAKCFGRFDPRTKRNRFKVCRQCWLNGYDG

SEQ ID NO: 4187 - protein, 755 aa, Sitodiplosis mosellana
MSRFEMMRAAQLENDGFKAFKATTKSGSQGSHLGPTLFLLFINDIVDEMDDVFISLFADDVEIAKIIHSSTDAAVLQRAIDMLKACRTMANRFKPSLPAEGETKDEITTIKCALKTIIRPQYQQALMSKITDLSVENNDFALFGGSGEDKIKLCFEQVLWHNNQPPKPKAKYKPTGEKPRGPQAELPRIDPEFKAIVEGLDDYHRIDWPNNKDFSNGLKHLTNQYTDNVVTNLETHANKHITQYLKLKEFELNSNLEEDGEKFLPSDIENVVKLIIKQKDIKVPSRDPNKLVRCEVLYDIVRDCNVFPEIDLHDLTTDPKHWYKAMPMYLSMQRVIEEYNSEWPHQRRPKPKDFNRDRDYWWNQYFYMRKIRRFVRGKKQFDFSINTDGISVSLQYSAKKKTVNKEIDQKSRIIQKIEDSTIKNYSGVDSGVRSWNTTTTHDIETGKETNFVMSSKQFHWQTGQKVRNAKAKRWTKNFVEMERADRENRELYPVMPSPKGSMWLNYIKHRVKMMKHGICAYSTAKYTRLALDKHIKSSSVVDEWVNKVTDKKPTLFFFGADGEIPPDSPISIKKHVRCRGVRKTLRSIKKRRDCFIQLVDEWGTSQTDARCMHRFENQRKDARFKRCRCIPDARTLLPTKIVSELGKTDLSIYRQLQRAMNEEASEEDECLFPKVKCYYKNWQLNLECSVIWHRDVVAAKNILLKGLWTLLGLPIPEAINRYWREAAEAAAAAVAIVDNDVEMFEYDQQPADHAV

SEQ ID NO: 4188 - protein, 633 aa, Sitodiplosis mosellana
MAQQSATKIEVKAIVEGLDDYHRIDWPNNKDFCNGLKHLTNQYTDNVVTNLETHANKHITQYLKLKVFQWNSDVGDDAEKFLPSDIASVVNLIIKQKDIKVPIRDPNKLERCSVLYDMVNDLNVFPDIDLHDLTTGKQHWFKAMPMYLSMQREIEEYNSEWPHQRRPKLVVPMCDFRRTHFKIDCSSMHQVLSSQKLLPKVEIENKKGTTSTKTIQQKDFNRDRDYWWNQYFYMRKIRRFVRGKKQFDFSINTDGISVSLQYSAKKKTANKEIDQKSRIIQKIEDGTIKNFSGVDTGVRSWNTTTTHDIETGKETNFVMSSKQFHWQTDQKVRNAKAARWTKNFVEMERADRENRELYPVMPSPKGSMWLNYIKHRVKMMKHGICAYSTAKYTRLALDKHIKSSSVVDEWVNKVTDKKPTLFFFGADGEIPPDSPISIKKHVRCPGVRKTLRSIKKRRDCFIQLVDEWGTSQTDARCMNRFQNQNKAARFKKCRCVPDARTLLPTKIVSKLGKTDLSIYRQLQRAMNEEALVGDESLFPKVKCYYKNWRLNLECSVIWHRDVVAAKNILLKGLWTLLGLPIPEAINRYWREAAEAAAAAAARATAEAAAAAVAIVDNDVEMFEYDQQPADHAV

SEQ ID NO: 4189 - protein, 728 aa, Sitodiplosis mosellana
MKRKRAQNGRPRSVKLSLNSVLRDQYRVNFVAQVNNWCHTATVITVLASLLFLFENNRAFDEDNHGFFSGNGYELIKDCFKNILNENRHKLPLAFRQIIEAAVPNFRWPQREGMGNAFNQLIDQYTTNVKNNIKTWCYTRIKTFFVLQRYELNLLGHNISDIDVKNATKSVMFNNIVPSANVERLLEQARMIGIPVGTKLCDLVRGSWFQTIPIFITIQRLVFNHHERYELLNDLWRRYYRDRLHNAMPSIARPPKIKNFRVIPIHDFKMKHIRIDIHLFYQMACKLGAIKLAKGLFGQPVNISKKVYDSNPFVSWDTIFNMDKIQKVGNRKTFDYTIVTDSVAVSLCFLKPECPSHEYSHEQINEMYENGVFRFVLGMDPGVRTWNATVRKHIASGVEENITIDGPKYHFRAKYGKRKRKSEKWLRLFTELEQHDRNQYPLYPSPKGASNWMSYIEHRVKMLQPGMEVYTARKYIRLNLDKHIEETRASDTIAAFLTRKLPSLIFLGAAQMAPNSPIGIKKRLRCPGARKLLNSFKKLHNCVVVMVDEFKTSQTCAKCFRPFDRRTRNDRYKVCRQCIPHAANITNDKHLSSVIISKKSNRSYQRERRHVVAEYERLNVHPVYSHGLVPKLNVWFKNWQLNTDNTWNDSRHPHQQNTVWHRDEVAAKCILYKGLCMIKGLDVHPQLSRQHHAAAAAAHNNAEGDQDDNDSDSDDDYVYVLDDVSDEE

SEQ ID NO: 4190 - protein, 651 aa, Sitodiplosis mosellana
MVMKSSKCASKVCSGKITPMIECLWSQVSGNSFKYLYEQYATNVKTNLKTHCEKRLRKFFKMRCYELNHMCLCGDLELDELFDGDDIKNSINYTYNRRDSTRGNANAIRKLEILLAELYWIGAPHRPDDPHPFNIREFVELNWFQALRMFINIQRDIHNFHLSFANLRRSWNLFRKHPLYVQEPEFPEPPEITTFTVIPKCTFQRRHVKIDTDSLYNILCGIKAMKREDGLRVNKKGEVLQRYISQTEFKRIGSWRSYFNMDEINKLVKNKKEFGDSIISDGVSASVLFKLPKQSKTVADEDEAETKRKYFANEFAYALGIDPGMRTFIASVRLDLKTGEETNKKISFKQYHQKSKQDARNIKAERMTRVFTYDEQADLKRIAAEIGQTPSPRNISWRHYIEHRLRMSQDGIAAYSQKNYARLRLDKHIEWRRAIDLIAGKLVHFKTAIINIGAAEISPNCPIRIKKYVRCPGVRKLIAAFKRRGNCVVRLVDEYMTSQHCARCFKRFPIWTKSKRYKKCNDCQPDERVGLPRTIYTNVSKRVLQMQRKIMRTWEEMRDQGDAIAAILTQRNSGRLVSKKQRFFKTWQPNAAENAGTEDAAQSRKLLKSLWHRDISAAKLIMYKGLCTLLDIPIHPALLRRPDDDGVPLNP

SEQ ID NO: 4191 - protein, 656 aa, Sitodiplosis mosellana
MKYLFQQYGRNVKTNLDTHAQKRLRYFLRLKAFRQNYTNRIRSLPDTYDERDIKNAVSWAMKRYDETRGDADRLAKRDRLLLYVRDIRGPADDDIAKFTKDEDTWFASLPMWLIMQSEIETHLNWVEQHHDNIVQVIALPNIKNLVVIPICHHTRKAVRIDADVLYRMMCGTGTIPRDEYGRQHSGSDVTSKSNQAYYFNMIFNMEKINRVLKANKKFEHILSDGVSASILYTVKKTVVDKLVEDGLVRKRYSDGFYVYELGIDWGMKTWNATVRRRINNDKERIHNGKEMNFTINSKKYHYCTEDGVRKKKRERWTRAFGQFEESDRNNRARYDRMPSPKGSNWRDYIRHRFTIMKKAIAVYTTEKYTRLSFDHYIKSNRVSDKVAAMLTNRKRCIINIGTSQPPANSPIQIKKHVRCPGVRKLVKSFKKMEGNVIRFVNEARSSRLCARCFEPFPLSTLNDRVKVCEWCMPDQDDWPDGMKLPEKIVAAKSKRKLRSERRAMRQAAVQNPNQPRGFVSKVICYRKNWQQNAANGMDDNVEERRGVIIHDAELGIIEYTDEFVPEDPVDDSPVLKTVWQRDISAAKLILYRALSGVPQGSHPGPTLFLIFINGIVDQMPSDIMILLFDDDIKIAKIIKYQQDSEILQQAIDKLKH

SEQ ID NO: 4192 - protein, 408 aa, Sitodiplosis mosellana
MWLTMQTEVDNFHIWAEENGIEIPKIKNLKVILIHQFMRQHVKMETDYEIVEDPMSQCWDEIFDMPKIHRLLKSNKRFRPYISSNGQAVSIMYEVPKSHLDRLVDDEIVRKRYRDGVYVYEIGIDPGMRTWNATVRRNIETGKEINFTISSKRYHYLARQGVWDRRAEQWTRQFVAEEQHDRERYQRMPSPKGENWGSYIAHRLTMLKKGIETYTTEKYARLQFDKYIQSNRATNKIANLLTNRKPSIIHMGAVDMPANSPIRIKKHVRRPGNPTQRDRMKVCEWCLPDNDDWPPNLQLPTKIVSKKSNRTLIADRQRMREAVEQDPNQAEHFVSKLISYQKNWQQSAAIDEDADPAEQEDAVESHDRRILKICWHRDITAAKLILYKGHCHLFGIQLLFIFTIERIR

SEQ ID NO: 4193 - protein, 508 aa, Sitodiplosis mosellana
MWIKIQRNISYFHTTYGILNSDWAKYKSDRVTNKMPLVPRPPKVKNFIAIPVHDFDLKHIRIDVTLLYEIARGLGALKHAIGKSGRKVSISREVYNKNPAQWWKHVFKMKKINKIGGRKMKFDCSIMTDSVSVSLMYIKSNRTLDAKDLKTIEDMYREGRFVYELGIDPGVRTWNATVRRTVATGDEENITIAGPTYHWRAKRSKRRQKEERWQRTFKEQQQRDLRSYPVVPSPKSKDAWKSYICHRLTMMALGIAVFGTRKYARLSFDKYVESTRASDKIAASLTNKKPSMIYLGAAQMAPNSPIGIKRRLRCPGTRKLLASFKKLNNCTVRFVDEYFTSQTCAKCFGRFDPRTKRNRFKVCRQCWLNGYDGQILPNKIVTTLSNRELKKERREKKQERMQQNVNNNQPRNAANPTRPAKTRLVSKLCKYYKCYSNEAGDLEWYASHINQEVTNWHRDVVAAKCILYKGRCEVFGYRIHPNLSRPVQHNEQNIDSDYEHISEVEDDE

SEQ ID NO: 4194 - protein, 809 aa, Sitodiplosis mosellana
MYEYIQKDWFESLWMWIGMQRIVEKFLIDTAHLREQWKAYDRDPVNNRDPSVPKIPKVKNFAAIPLCDTKLKHIPFDHDDLINIIGQLRNERGWDIRADYRTYYKQGENKDEAWGIVFDMDKIRQLRTGSKEFYHKNQTNSSAVSVLFSRPKRKGAGVTLSEIKAKYEKPVSKGGYKYESGIDPGQKTKMACVRRTLATGIETNIKLSSIQYHWGARQGMRDKQATKMTRKYVHKEQRDLKSYPITSVSPRGSQWKSFIKHKIKMLTDSLATYARRKYAQLSLHKYIESNREMDLMAKHITNNETGVVYLGDAAFPSNSKIGVKRTKRSPDQRKFIVSLKKNGKTDVVLTPEPYTSQTCANCLRRFPRSTKSDRFKVCKDCRPHKDVRLPLVIVTDRSRRRKQRDRKQNASQKPTANVTRAEKAEKHREKRRSERESHNPEQLDTEEAVRRYNRRIRRRELRQRRRVAGHRSRKVTKQPEAESDLPGSIGIELVALIHSEVAGKNPDEKHGDRLGRLSFKICELLTQNDLQIVSQPFELKKSGPTSKIIMSLALKILKRSENGSSDLTPLEDTPIEEAEEPQEENAVSDGENAPESDVHAEKVSNLGSSLVESGPRNGESSLCCYGLGSIKLTLHYSVELQYLSVTVHKIINIPVKDQSVALNPYVKLYLLPGRSSDSKRKTKVVKDSSDPIYEENFRYLLSPAELRVRKLEVVVSTRNAFYALLHGSGSIVGKHLLQYIPKKYHDFYKAIKFSDSDELKKDYALASRQSSDEDSELSMSDSFDESDGDGEAANTNANDEDVYEFRMSE

SEQ ID NO: 4195 - protein, 551 aa, Sitodiplosis mosellana
MYSTRLLRCYYVQHQPQNITAAQQKVAIEHTVKYLFNPVSRVNADDDLLQFAEDVILTNFVLDRGSLAGAKDKFGFNWFQYIPYFIRAQLYIDSVNQNNSSVEDHIVNFIVVPQHNYSRLFADLDGIGMVQLYNFEAPYGQALNERHGAQAFERLFHANQLRRQVRENNALYVRTDGVHLDVLYKKRSNRKLFPMLVGLSGKDKTAAIGEFNEIHRVRMRNTFRQRQYRYLIGIDFGSEHMIVFTSVDLNDGNAETVGYLSTKQYYKLMKHDEYVEEKNKIIAGFQKKQSQNRKWVESEYRVTPSATSPAFMQYIDHRLRLFTEGTDVFMNEELAILEFRQYQRKQAVLQLIVQEVTLGERCAVKLGLNPIGANSHIKGNPRGPINDVIEEFETAENVDIYVGDEYNSSQMCSKDHKQMKFTQFEILPPPPRWRKIVLAVTAPGKIQIFRPNLENASYAAARTLAYRYKKIEPDEAKPHWNKVLELSRTMCSHVMWYNKCADANDCNFWRIDEKMDMDAKEDVASDEDIDEDDNISVAQPYSSDSDDDPLY

SEQ ID NO: 4196 - protein, 764 aa, Sitodiplosis mosellana
MANRFKPSIPAEGETKDEITTIKCALKTIIRPQYQQALMSKITDLSVENNDFALFGGSGEDKIKLCFEQVLWHNNQPPKPKSTYKPRGEKPRGPRAELPRIDPEFKAIVEGLDDYHRIDWPNNKDFCNGLKHLTNQYTDNVVTNLKTHANKHITQYLKLKVFQWNSDVGDDAEKFLPSDIASVVNLIVKQKDIKVPIRDPNKLERCSVLYDMVNDLNVFPEIDLHDLTTDPKHWFKAMPMYLSMQREIEEYNSEWPHQRRPKRKKRKRKKTKGKWKRKRSQMLDNPDFRPLIRNLVVVPMCDFRRTHFKIDCSSMHQVLSSQKLLPKVEIENKKGTTSTKTIQQKDFNHSRDYWWNQYFYMRKIRRFVRAKKQFDYSINTDGISVSLQYSAKKKTDNKEIDQKSRIIQKIEDGTIKNYSGVDTGVRSWNTTTTHDIETGKETNFVMSSKQFHWQTGQKVRNAKAKRWTKNFVEMERADRENRDLYPVMPSPKGSTWLNYIKHRVKMMKHGICAYSTAKYTRLALDKHIKSSSVVDEWVNKVTDKKPTLFFFGADGEIPPDSPISIKKHVRCPGVRKTLRSIKKRRDCFIQLVDEWGTSQTDARCMNRFQNQNKAARFKKCRCVPDARTLLPTKIVSKLGKTDLSIYRQLQRAMNEEALVGDERLFPKVKCYYKNWRLNLECSVIWHRDVVAAKNILLKGLWTLLGLPIPEAINRYWREAAEAAAAVAAAAAARATAEAAAAAVAIVDNDVEMFENDQQPADHAV

SEQ ID NO: 4197 - protein, 760 aa, Sitodiplosis mosellana
MANRFKPSIPAEGETKDEITTIKCALKTIIRPQYQQALMSKITDLSVENNDFALFGGSGEDKIKLCFEQVLWHNNQPPKPKSTYKPRGEKPRGPRAELPRIDPEFKAIVEGLDDYHRIDWPNNKDFCNGLKHLTNQYTDNVVTNLKTHANKHITQYLVLKVFELNSNLEEDGEKFLPSDIENVVKLIIKQKDIKVPSRDPNKLVRCEVLYDIVRDCNVFPEIDLHDLTTDPKHWYKAMPMYLSMQREIEEYHAMWPHQHRSKRKKRKRKKTKGKWKRKRRQMLDNPDFRPLIRNLVVVPVCDFRRTHFRIDCTSMRQVLSSQKLLPKVEIENKKGTTSTIIIPEKDFNRDRDYWWNQYFYMRKIRRFVRAKKQFDFSINTDGISVSLQYSAKKKTANKETDQKSRIIQKIEDGTIKNFSGVDTGVRSWNTTTTHDIETGKETNFVMSSKQFHWQTDQKVRNAKAARWTKNFVEMERADRENRELYPVMPSPKGSMWLNYIKHRVKMMKHGICAYSTAKYTRLALDKHIKSSSVVDEWVNKVTDKKPTLFFFGADGEIPPDSRISIKKHVRCPGVRLTLRSIKKRRDCFIQLVDEWGTSQTDARCMNRFQNQNKAARFKKCRCVPDARTLLPTKIVSKLGKTDLSIYRQLQRAMNEEALVGDESLFPKVKCYYKNWQLNLECSVIWHRDVVAAKNILLKGLWTLLGLPIPEAINRYWREAAEAAAAAAARATAEAAAAAVAIVDNDVEMFEYDQQPADHAV

SEQ ID NO: 4198 - protein, 202 aa, Sitodiplosis mosellana
MAPNSPIEIKRRLRCPGTRKLLVSFKKLNNCTVRFVEEYFTLQTCAKCFGRFDPRTKRNRFKVCRQCWLNGYDGQILPNKIVTTLSSRKLKKAHKEEKDERTQQNVNNNQPRNAANPTRPAKTRLVSKLCKYYKCHSNQAGDLEWYASHIDQNVTNWHRDVVAAKCILYKGRCEVFGYRIHPNLSRPVQHNEQNISEDEDDE

SEQ ID NO: 4199 - protein, 728 aa, Sitodiplosis mosellana
MKRKRAQNGRPRSVKLSLNSVLRDQYRANFVAQVNNWCHTATVITVLASLLFLFENNRAFDEDNHGFFSGNGYELIKDCFKNILNENRRKLPLAFRQIIEAAVPNFRWPQREGMGNAFNQLIDQYTTNVKNNIKTWCYTRIKTFFVLQRYELNLLGHNISDIDVKNATKSVMFNNIVPSANVERLLEQARMIGIPVGTKLCDLVRGSWFQTIPIFITIQRLVFNHHERYELLNDLWRRYYRDRLHNAMPSIARPPKIKNFRVIPIHDFKMKHIRIDIHLFYQMACKLGAIKWAKGWIGQPVNISKTVYDSNPFVSWDTIFNMDKIQKVGNRKTFDYAIATDSVAVSLCFLKPECPSHEYSHEQINEMYENGVFRFVLGMDPGVRTWNATVRKHIASGVEENITIDGPKYHFRAKYGKRKRKSEKWLRLFTELEQHDRNQYPFYPSPKGASNWMSYIEHHVKMLQPGMEVYTARKYIRLNLDKHIEENRASDTIAAFLTRKLPSLIFLGAAQMAPNSPIGIKKRLRCPGVRKLLNSFKKLHNCVVVMVDEFKTSQTCAKCFRPFDRRTRNDRYKVCRQCIPHAANITTDKHLSSVIISKKSNRSYQRERRHVVAEYERLNVHPVYSHGLVPKLNVWFKNWQLNTDNTWNDSRHPHQPNTVWHRDEVAAKCILYKGLCMIKGLDVHPQLSRQHHAVAAAAQNNPEGDQDDNDSDSDDDYVYVLDDVSDEE

SEQ ID NO: 4200 - protein, 480 aa, Sitodiplosis mosellana
MYEYIQRDWFESLWMWIGMQRIVEKFLIDTAHLRQQWKVYDRDPVNNREPSVPKIPKVKNFAAIPLCDTKLKHIPFDHNDLIDIIGQLRNERGWDIRADYRTYYKQGENKDEAWGIVFDMDKIRQLRTGSKEFFHKIQTNSSAVSVLFSRPKRKGAGVTLSEIKAKYEKPVSKGGYKPTSNYRVFNITGVRDKQATKMTRKYVHKEQRDLKSYPITSVSPRGSQWKSFIKHKIKMLTDSLATYARRKYAQLSLHKYIESIREMDLMAKHITNNETGVVFLGDAAFPSNSKIGVKRTKRSPDQRKFIVSLKKNGKTDVVLTPEPYTSQTCANCLRRFPRSTKSDRFKVCKDCRPHKDVGLPPVIVTDRSRRRKQRDRKRNASQKPTANVTRAERAEKHRENRRSERESHNPEQLDTEEAVRRYNRRIRRRELRQRRRVAGHRSRKVTKQPEAESDLPGFKGYGQNVEMANRDGQSNAVDDK

SEQ ID NO: 4201 - protein, 757 aa, Sitodiplosis mosellana
MKIDETKTEKKVLDNDGGKSTRSKRKLMTQNKAQKSIEEKYAASENIARKDPEPTKPLTIAKPDFAVNEIVWSKIKGNAPWPARIERIIITPAGRTMYEVYWYNDYRRSKVFKLQGSIMGGKRIGAHAIRGNRSKPRKVEDGKQKEEKAYFAIKLAAASIVRPEYRDRILPWITKTSIKCTEISELASLLFLNKVRAATEQAIITGNWEYFDDGDGMHIIENCFYAVLRRYKEDDFIMDPWFRHCFENVDIENRSAWPNNDYFGNLMKYLFQQYGRNVKTNLDTHAQKRLRYFLRLKAFRQNYTNRIRGLPDTYDERDVANAVSWAIKRYDATRGDANRLAKRDRLLRYVRDIRGPADDDIAKFTKDEDTWFASLPMWLIMQSEIETHLNWVEQHHDNIVQVIALPNIKNLVVIPICHHTRKAMNFTINSKKYHYGTGEGVRKEKRERWTRAFGQFEESDRNNRVRYDRMPSPKGSNWRDYIRHRLTIMKKAIAVYTTKKYTRLSFDHYIESNRINDKVAAMLTNRKRCIINIGASQPAANSPIKIKKHVRCPGVRKLVKSFKKMEGNVIRFVNEARSSRLCARCFEPFPLSTLNDRVKVCEWCMPDQDDWPDGMKLPEKIVAAKSKRKLRSERRAMRQAAVQNPNQPRGFVSKVICYRKNWQQNAANGMDDNVEERRGVIIHDAELGIIEYTDEYVPEDPVDDSPVLKTVWQRDISAAKLILYRGHCELFGHRLHDAFTRQHLVYPTRFRVNFNIH

SEQ ID NO: 4202 - protein, 226 aa, Sitodiplosis mosellana
MPLVPRPPKVKNFIAIPVHDFDFKHIRIDVKHFYEIACGLGALKHAIGKRGGKRFRFVHVRQIRTLDAKDLKIIEDMYREGRFVYELGIDPGVRTWNATVRRTVATGKHHDCWSNVSLEGETTNRKQKEERWQRTFKEQQQRDLRSYPVVPSPKSKDAWKSYICHRLTMMAVGIAVFGTRKYARLSFDKYVESTRASGKIAASLTNKKPSMIYLGAAQTKVLHLSV

SEQ ID NO: 4203 - protein, 541 aa, Sitodiplosis mosellana
MARGARGSRGGSDDRFTTVKLALRTIIQKPYRLILTTVIGEMSIMATLISLLASLYFLYLVNTAIDDFNNDFFNSDGDEIIKMCFQVIPKCTFQRRHVKIDTDSLYNILKGIKAMPRTKGTRVLRDGEYQERWISQIEFKERGGWRLFFNMDEIIKLVKNKKEFGDSIVSDGVSASVLFKLPKQSKTVTDEEEAETKRKYFANEFAYALGIDPGMRTFIASVRLDLKTGEETNEKISFKQYHLKSKQDARNIKAERMTRVFTYDEQADLKRIAAEIGQTPSPRNISWRHYIEHRLRMSQDGIAAYSQKNYARLRLDKHIEWRRAIDLIAGKLVHFKTAIINIGAAEISPNCPIRIKKYVRCPGVRKLIATFKRRGNCVVRLVDEYMTSQHCARCFKRFPIWTKSKRYKKCNDCQPDERVGLPRTIYTNVSKRVLQMQRKIMRTWEEMRDQGDAIAAILTQRNSGRLVSKKQRFFKTWQPNAAENAGTEDAAQSRKLLKSLWHRDISAAKLIMYKGLCTLLDIPIHPALLRRPDDDGVPLNP

SEQ ID NO: 4204 - protein, 593 aa, Sitodiplosis mosellana
MGRKRIGAHVVRGNRSKPRKVEDGKQKEEKAYFAIKLAAASIVRPEYRDRILPWITKTSIKCTEISELASLLFLNKVRAATEQAIITGNWEYFDDGDGMHIIENFFFAVLRSYKEDDFIMDPWFRHCFENVDTENRSAWPNNDYLGNLMKYLFQQYGRNVKTNLDTHAQKRLRYFLRLNAFRQNYTNRIRGLPDTYDERDVANAVSWAMKRYDATRGDADRLAKRDRLLLYVRDIRGPADDDIAKFTKDEDTCDGVSASILYSVKKTVVDKLVEDGLVHKRYSDGFYVYELGIDWGMKTWNATVRRRINNDKERIHNGKEMNFTINSKKYHYCTGEGVRKKKRERWTRAFGQFEENDRNNRVRYDRMPSPKGSNWRDYIRHRMTIMKKAIAVYTTEKYTRLSFDHYIESNRVSDKVAAMLMFRTVSIEYIERSFKVCEWCMPDQDDWPDGMKLPEKIVVAKSRRKLRSERRAMRQAAVQNPNQPRGFVSKVICYRKNWQQNAANGMDDNVEERRGVIIHDAELGIIEYTDEFVPEDPVDDSPVLKTVWQRDISAAKLILYRGHCELFGHRLHDAFTRQRLVYPTRFRVNFNNH

SEQ ID NO: 4205 - protein, 951 aa, Sitodiplosis mosellana
MKSRTMANRFKPSIPAEGETKDEITTIKCALKTIIRPQYQQALMSKITDLSVENNDFALFGGSGEDKIKLCFEQVLWHNNQPPKPKSTYKPRGEKPRGPRAELPRIDPEFKAIVEGLDDYHRIDWPNNKDFCNGLKHLTNQYTDNVVTNLETHANKHITQYLVLKVFELNSNLEEDGEKFLPSDIASVVNLIIKQKDIKVPIRDPDKLVRCEVLYDIVRDCNVFPEIDLHDLTTDPKHWYKAMPMYLSMQREIEEYHAMWPHQHRSKRKKRKRKKKKGKWKRKRRQMLDNPDFRPLIRNLVVVPMCDFRRTHFKIDCSSMHQVLSSQKLLPKVEIENKKGTTSTKTIQQKDFNHSRDYWWNQYFYMRKIRRFVRAKKQFDYSINTDGISVSLQYSAKKKTDNKEIDQKSRIIQKIEDGTIKNYSGVDTGVRSWNTTTTHDIETGKETNFVMSSKQFHWQTGQKVRNAKAKRWTKNFVEMERADRENRDLYPVMPSPKGSMWLNYIKHRVKMMKHGICAYSTAKYTRLALDKHIKSSSVVDEWVNKVTDKKPTLFFFGADGEIPPDSPISIKKHVRCPGVRKTLRSIKKRRDCFIQLVDEWGTSQTDARCMNRFQNQNKAARFKKCRCVPDARTLLPTKIVSKLGKTDLSIYRQLQRAMNEEALVGDERLFPKVKCYYKNWRLNLECSVIWHRDVVAAKNILLKGLWTLLGLPIPEAINRYWREAAEAAAAVAAAAVAIVDNDVNGEKVAIILLDTQGIFDHQSTRRDCTTTFALSMLLASVQCYNVMQNVQEDDLENLEMFTEYGRLAIEQTHQKPFQKLLFIIRDWPNAFETGYGWNGQQVIDEILSEADGQTAENHQLRERIKSSFEEVKAFLMPHPGRAVANGTFTGQLQQIDPEFIEYVKQLVPALFAPENLVIKKINNERVRILMAAQRPLFRPKVTDFFNIFFEH

SEQ ID NO: 4206 - protein, 775 aa, Sitodiplosis mosellana
MGYQRKKAKKKGKPIAVLGDVIEEDEKEKDSGIRTVKTQLRAILRPEYRDLLIAAITDRSMMATKICALASQLFLFRCERAFEDNDKGFFEQNGEKVIRSCFFGVLKKNIYKKKKMPPEFRKMVQQLDDSHRVVWPNADYFGNGMNDLIDTYVTNVKNNLKTHSKKRLREWLRVKVFESSLVARYEQADIDRVISLAIFGNDDITINGMDDVAKRERRTLLIGMVTKNSWWDIPDNNIGRFTNGKDWFKSIAFWISLQRKIDDFNTCEEYREERRYQREEFEELKRCRRRNHRPCTCQQPVDRGQNGNEYIEKGPPRVKNLAVIPICSFTRTHFTLDIRTLYFLLRQLGIVPLNITEDEFRKQKEYYWDQYFDMRKIYHLGRSRKKFRFRILSNGQAVSLQFDIDKTKMSNMEPDKKAIVQNYKKFVNEGATDPGVNTWNATTVHNIATGKEANYTISSKQYHYWTKQTVRNRQGKRWTKDFIKEERQDRENRALYPVMPSPLGRHWEDYIRHRLKMTERGIAVYTTDKYTRLNFDKYVRANSVTDSIAGMLTNHQPTLMHFGAAQMSPSSPIGIKKTLRCPGNRKMIRSYKKCRGCVVNMVDEYYTSQTCAKCFGRFDRRTKRHRFKVCHDCRPQSVVRAMLPSMIVCKVNKRKMRHEKLKLFLLEKEAEEGNGNPAVGNDVPHPDQLNPELLPKVAIYHKTWHVNESSGILEYVKFNSAGEMEVVEPRLHKTTWHRDIAAAKCILIKGHCDLFGFKLPETLQRPSNQRAAVNN

SEQ ID NO: 4207 - protein, 757 aa, Sitodiplosis mosellana
MGRKRIGAHAIRGNRSKPRKVEDDKQKEEKSYFAIKLAAAIRAATEQSIITGNWEYFDDGDGMHIIENCFYAVLRRHKEDNFIMDSWFRHCFENVDTENRSAWPNNDYFGNLMKYLFQQYGRNVKTNLDTHAQKRLRYFLRLKAFRQNYTNRIRGLPDTYDERDVANAVSWAIKRYDATRGDADRLAKRDRLLLYVRDIRGPADDDIAKFTKDEDTWFASTICQLQKYAKLAPPNELDLSTHVYVRFGQTEIETHLNWVEQHHDNIVQIIALPNIKNLVVIPICHHTRKAVRIDADVLYRMMCETGTIPRDEYGRQYTVDHVTSKSNQAYYFNMIFNMEKINRVLKANKKFEHILSDGVSASILYSVKKTVVDKLVEDGLVRKRYSDGFYVYELGIDWGMKTWNATVRRRINNDKERIHNGKEMNFTINSKKYHYCTGEGVRKEKRERWTRAFGQFEESDRNNRARYDRMPSPKESNWRDYIRHRFTIMKKAIAVYTTEKYTRLSFDHYIESNRVSDKVAAMLTNRKRCIINIGASQPPANSPIQIKKHVRCPGVRKLVKSFKKMEGNVIRFVNEARSSRLCARCFEPFPLSTLNDRVKVCEWCMPDQDDWPDGMKLPEKIVAAKSKRKLRSERRAMRQAAVQNPNRPRGFVSKVICYRKNWQQNAANGMDDNVEERRGVIIHDAELGIIEYTDEYLPEDPVDDSPVLKTVWQRDISAAKLILYRGHYELFGHRLHDAFTRQHLVYPTRFRVNFNVH

SEQ ID NO: 4208 - protein, 752 aa, Sitodiplosis mosellana
MGAHAIRGNRSKPRKVEDGKQKEEKAYFAIKLAAASIVRPEYRDRILPWITKTSIKCTEISELASLLFLNKVRAATEQAIITGNWEYFDDGDGMHIIENCFYAVLRRYKEDDFIMDPWFRHCFENVDIENRSAWPNNDYFGNLMKYLFQQYGRNVKTNLDTHAQKRLRYFLRLKAFRQNYTNRIRGLPDTYDERDVANAVSWAIKRYDATRGDANRLAKRDRLLRYVRDIRGPADDDIAKFTKDEDTWFASLPMWLIMQSEIETHLNWVEQHHDNIVQVIALPNIKNLVVIPICHHTRKAVRIDADVLYRMMCETGTIPRDEYGRQHTVGHVTSKSNQANYFNMIFNMEKINRVLKANKKFEHILSDGVSASILYTVKKTVVDKLVEDGLVRKRYSDGFYVYELGIDWGMKTWNATVRRRINNDKERIHNGKEMNFTINSKKYHYGTAEGVRKEKRERWTRAFGQFEESDRNNRARYDRMPSPKGSNWRDYIRHRLTIMKKAIAVYTTKKYTRLSFDHYIESNRVSDKVAAMLTNRKRCIINIGASQPAANSPIKIKKHVRCPGVRKLVKSFKKMEGNVIRFVNEARSSRLCARCFQPFPLSTLNDRVKVCEWCMPDQDDWPDGMKLPEKIVAAKSKRKLRSERRAMRQAAVQNPNQPRGFVSKVICYRKNWQQNAANGMDDNVEERRGVIIHDAELGIIEYTDEYVPEDPVDDSPVLKTGIANSLDIGCMMRSHVQHLVYPTRFRVNFNIH

SEQ ID NO: 4209 - protein, 860 aa, Sitodiplosis mosellana
MKAIEAVIGIENKEAFLKKLSSVCTDGTNMNVGENNSLWVLLDEEMSAIKSEIPLIKVWCAAHRAELAWGDTGRKERESRHATTSFEEIRKEVLNSLQDFLENRFEADDAFVRMIAPFITFDSNADIEAIHATVAPDLNLPSLSLQFQDIVSDREAYDVLNFSYFTLWGGKRIGAHAIRGNRSKPRKVEDGKQKEEKAYFAIKLAATSIVRPEYRDRILPWITKTSIKCTEISELASFLFLNKVRAATEQAIITGNWEYFDDGDGMHIIENCFYAVLRRYKEDDFIMDPWFRHCFENVDIENRSAWPNNDYFGNLMKYLFQQYGHRTTLTGFDGLPDTYDERDVANAVSWAIKRYDATRGDANRLAKRDRLLRYVRDIRGPADDDIAKFTKDEDTWFASLPMWLIMQSEIETHLNWVEQHHDNIVQVIALPNIKNLVVIPICHHTRKTVRIDADVLYRMMCGTGTIPRDEYGRQYTVGHVTAKSNQAYYFNMIFNMEKINRVLKANKKFEHILSDGVSASILYSVKKTVVDKLVEDGLVRKRYSDGFYVYELGIDWGMKTWNATVRRRINNDKERIHNGKEMNFTINSKKYHYGTGEGVRKEKRERWTRAFGQFEESDRNNRVRYDRMPSPKGSNWRDYIRHRLTIMKKAIAVYTTKKYTRLSFDHYIESNRVSDKVAAMLKNRKRCIINIGASQPAANSPIKIKKHVRCPGVRKLVKSFKKMEGNVIRFVNEARSSRLCARCFEPFPLSTLNDRVKVCEWCMPDQDDWPDGMKLPEKIVAAKSKRKLRSERRAMRQAAVQNPNQPRGFVSKVICYRKNWQQNAANGMDDNVEERRGVIIHDAELGIIEYTDEYVPEDPC

SEQ ID NO: 4210 - protein, 675 aa, Sitodiplosis mosellana
MDNSHELTLNNISSVDNEPPKPKSTYKPRGEKPRGPRAELPRIDPEFKAIVEGLDENHRIDWPNNKDFCNGLKHLTNQYTDNVVTNLKTHANKHITQYLVLKVFELNSNLEEDGEKFLPSDIENVVKLIIKQKDIKVPIRDPDKLVRCEVLYDIVRDCNVFPEIDLHDLTTDPKHWYKAMPMYLSMQREIEEYHAMWPHQHRSKRKKRKRKKKKGKWKRKRRQMLDNPDFRPLIRNLVVVPMCDFRRTHFKIDCSSMHQVLSSQKLLPKVEIENKKGTTSTKTIQQKDFNRDRDYWWNQYFNMRKIRRFVRAKSQFDYSIKTDGISVSLQYSAKKKTANKEIDQKSRIIQKIEDGTIKNYSGVDSGVRSWNTTTTHDIETGKETNFVMSSKQFHWQTGQKVRNAKAKRWTKNFVEMERADRENRDLYPVMPSPKGSMWLNYIKHRVKMMKHGICAYSTAKYTRLALDKHIKSSSVVDEWVNKVTDKKPTLFFFGADGEVPPDSRISIKKHVRCPGVRKTLRSIKKRRDCFIQLVDEWGTSQTDARCMNRFQNQNKAARFKKCRCVPDARTLLPTKIVSKLGKTDLSIYRQLQRAMNEEALVGDESLFPKDYGHYWDFRYQRRSIGIGAKLLKQPLLLPLLLPLEQPLKQPLLLVAIVDNDVEMFEYDQQPADHAV

SEQ ID NO: 4211 - protein, 577 aa, Sitodiplosis mosellana
MGNAFNQLIDQYTTNVKNNIKTWCYTRIKTFFVLQRYELNLLGHNISDIDVKNATKSVMFNNIVPSSNVERLLEQARMIGIPVGTKLCDLVRGSWFQTIPIFITIQRLVFNHHERYELLNDLWRRYYRDRLHNAMPSIARPPKIKNFPVIPIHDFKMKHIRIDIHLFYQMACKLGAIKLAKGLFGQPVNISKKVYDSNPFVSWDTIFNMDKIQKVGNRKTFDYTIVTDSVAVSLCFLKPECPSHEYSHEQINEMYENGVFRFVLGMDPGVRTWNATVRKHIASGVEENITIDGPKYHFRAKYGKRKRKSEKWLRLFTELEQHDRNQYPFYPSPKGASNWMSYIEHRVKMLQPGMEVYTARKYIRLNLDKHIEENRASDTIAAFLTRKLPSLIFLGAAQMAPNSPIGIKKRLRCPGVRKLLNSFKKLHNCVVVMADEFKTSQTVIISKKSNRSYQRERRHVVAEYERLNVHPVYSHGLVPKLNVWFKNWQLNTDNIWNDSRHPHQQNTVWHRDEVATKCILYKGLCMIKGLDVHPQLSRQHHAAAAAAQNNAEGDQDDNDSDSDDDYVYVLDVVSDEE

SEQ ID NO: 4212 - protein, 702 aa, Sitodiplosis mosellana
VENNDFALFGGSGEDKIKLCFEQVLWHNNQPPKPKSTYKPRGEKPRGPRAELPRIDPEFKAIVEGLDDYHRIDWPNNKDFCNGLKHLTNQYTDNVVTNLETHANKHITQYLVLKVFELNSNLEEDGEKFLPSDIASVVNLIIKQKDIKVPIRDPDKLVRCEVLYDIVRDCNVFPEIDLHDLTTDPKHWYKAMPMYLSMQREIEEYHAMWPHQHRSKRKKRKRKKKKGKWKRKRRQMLDNPDFRPLIRNLVVVPMCDFRRTHFKIDCSSMHQVLSSQKLLPKVEIENKKGTTSTKTIQQKDFNHSRDYWWNQYFYMRKIRRFVRAKKQFDYSINTDGISVSLQYSAKKKTANKEIDQKSRIIQKIEDGTIKNFSGVDTGVRSWNTTTTHDIETGKETNFVMSSKQFHWQTDQKVRNAKAARWTKNFVEMERADRENRELYPVMPSPKGSMWLNYIKHRVKMMKHGICAYSTAKYTRLALDKHIKSSSVVDEWVNKVTDKKPTLFFFGADGEIPPDSPISIKKHVRCPGVRKTLRSIKKRRDCFIQLVDEWGTSQTDARCMNRFQNQNKAARFKKCRCVPDARTLLPTKIVSKLGKTDLSIYRQLQCAMNEEALVGDERLFPKVKCYYKNWRLNLECSVIWHRDVVAAKNILLKGLWTLLGLPIPEAINRYWREAAEAAAAAVAIVDNDVEMFENDQQPADHAV

SEQ ID NO: 4213 - protein, 718 aa, Sitodiplosis mosellana
VENNDFALFGGSGEDKIKLCFEQVLWHNNQPPKPKSTYKPRGEKPRGPRAELPRIDPEFKAIVEGLDDYHRIDWPNNKDFCNGFKHLTNQYADNVVTNLTTHANKHITQYLKLKVFQWNSDVGDDAEKFLPSDIASVVNLIVKQKDIKVPIRDPNKLERCSVLYDMVNDLNVFPEIDLHDLTTDPKHWFKAMPMYLSMQREIEEYNSEWPHQRRPKRKKRKRKKTKGKWKRKRSQMLDNPDFRPLIRNLVVVPMCDFRRTHFKIDCSSMHQVLSSQKLLPKVEIENKKGTTSTKTIQQKDFNHSRDYWWNQYFYMRKIRRFVRAKKQFDYSINTDGISVSLQYSAKKKTDNKEIDQKSRIIQKIEDGTIKNYSGVDTGVRSWNTTTTHDIETGKETNFVMSSKQFHWQTGQKVRNAKAKRWTKNFVEMERADRENRDLYPVMPSPKGSTWLNYIKHRVKMMKHGICAYSTAKYTRLALDKHIKSSSVVDEWVNKVTDKKPTLFFFGADGEIPPDSPISIKKHVRCPGVRKTLRSIKKRRDCFIQLVDEWGTSQTDARCMNRFQNQNKAARFKKCRCVPDARTLLPTKIVSKLGKTDLSIYRQLQRAMNEEALVGDERLFPKVKCYYKNWRLNLECSVIWHRDVVAAKNILLKGLWTLLGLPIPEAINRYWREAAEAAAAVAAAAAARATAEAAAAAVAIVDNDVEMFENDQQPADHAV

SEQ ID NO: 4214 - protein, 743 aa, Sitodiplosis mosellana
MGTTAYEYKAHIEHWLNGMPKGNKIHANWVVPMATAAIDQIFHEPKDMFWTGKIMDVLFRGIPVDCSNTEQFQAKAVCGLFESGEVKAVQKHNDTHFMFSLFQSGSIMGRKRMGAHAIRGNRSKPRKVEDGKQKEEKAYFAIKLAAASIVRPEYRDRILPWITKTSIKCTEISELASLLFLNKVRAATEQAIITGNWEYFDDGDGMHIIENCFYAVLRRYKEDNFIMDPWFRHCFENVDTENRSAWPNNDYFGNLMKYLFQQYGRNVKTNLDTHAQKRLRYFLRLKAFRQNYTNRIRGLPDTYDERDVANAVSWAIKRYECLCEICAKPVPFRVMNMVGNIHDGVSASILYTVKKTVVDKLVEDGLVRKRYSDGFYVYELGIDWGMKTWNATVRRRINNDKERIHNGKEMNFTINSKKYHYGTGEGVRKEKRERWTRAFGQFEESDRNNRARYDRMPSPKGSNWRDYIRHRMTIMKKAIAVYTTEKYTRLSFDHYIESNRVSDKVAAMLTNRKRCIINIGASQPPANSPIKIKKHVRCPGVRKLVKSFKKMEGNVIRFVNEARSSRLCARCFEPFPLSTLNDRVKVCEWCMPDQDDWPDGMKLPEKIVVAKSKRKLRSERRAMRQAAVQNPNQPRGFVSKVICYRKNWQQNAENGMDDNVEERRGVIIHDAELGIIEYTDEFVPEDPVDDSPVLKTVWQRDISAAKLILYRGHCELFGHRLHDAFTRQHLVYPTRFRVNFNIH

SEQ ID NO: 4215 - protein, 1049 aa, Sitodiplosis mosellana
MYEYIQKDWFESLWMWMGMQRIVEKFLIDTAHLREQWKAYDRDPVNNREPSVPKIPKVKNFAAIPLCDTKLKHIPFDHKDLIAIVGQLRNERGWDIRADYRTYYKQGENKDEAWGIVFDIDKIRRLRTGSKEFYHKIQTNSSAVSVLFSRPKRKGAGVTLEQIKAKYEKPVSKGGYKYESGIDPGQKTKMACVRRTLATGIETNIKLSSIQYHWGARQGMRDKQATKMTRKYVHKEQRDLKSYPITSVSPRGSQWKSFIKHKIKMLTDSLATYARRKYAQLSLHKYIESNREMDLMAKHITNNETGVVFLGDAAFPSNSKIGVKRTKRSPDQRKLIVSLKKNGKTDVVLTPEPYTSQTCANCLRRFPRSTKSDRFKVCKDCRPHKDVRLPPVIVTDRSRRRKQRDRKENASQKPTANVTRAEKAEKHREKRRSERESHNPEQLDTEQAVRRYNRRIRRRELRQRRRVAGHRSRKVTKQPEAESDLPVPTHNPNRLHIASTSVQQNDGIYKCHFGDEYQIEDVSGAVAKFTIRSVGINHVIFQSMDRKLACVRICYKTNGEKICDERSIQNSFVEVDSLTAATDYKFLLYQCGESKKLFFEGDIETEHDIPGSVSEHKVYKKNGGIALEWSAPTKPNGILDHYLIQWTIGNVTHSEEFRYQEREKNVFEFPGLQDTDRFNISICAVSNFGNGLPIYVDLRDVTDIPEEDEGMNAKNRDPRLGISIGVLLSVLCIIGCVLIIIRHRRCSKSPQHQHINGNGNNARGSFQNRSPLNRAPVAGTTMIVPNSSAQISANCAPDAHEMQTLIVTSSVENIPSTNGNGVAKKLDNHNMNGVVVRGNRNSFNNANVHSDDDDHADLMRCGLISSTPKLKHKTNNANNDHLKNTSTNHGSHTANPVDLPYRRIDCDLDALGAAEIAPNITLGNGSLHQMKTTLPPNKSVHSIVYNETEIPPTIIRTNDDKANHHPKHRTSTAHKSNVSIPSIFDDSQQSLLPDANATESSSASTSSGSVPMDRIANKTNCIFDVNTFDNGAPHPIIENQRYMRSAALV

SEQ ID NO: 4216 - protein, 1544 aa, Sitodiplosis mosellana
MVQTVYVEEDNSISQKQRPPKPKSRYKPSGTKPRGPRAELPRIDPEFKAIVEGLDDYHRIDWPNNKNFGNGLKHLTNQYTDNVVTNLETHANKHITQYLKLKVFQWNSDVGDDAEKFLPSDIASVVNLIIKQKDIKVPIRDPDKLVRCEVLYDIVRDCNVFPEIDLHDLTTDPKHWYKAMPMYLSMQREIEEYNSEWPHQRRPKRKKRKRKKTKGKWKRKRSQMLDNPDFRPLIRNLVVVPMCDFRRTHFRIDCTSMRQVLSSQKLLPKVEIENKKGTISTTIIPGKDFNRDRDYWWNQYFYMRKIRRFVRAKKQFDYSINTDGISVSLQYSAKKKTANKEIDQKSRIIQKIKDGTIKNYSGVDSGVRSWNTTTTHDIETGKETNFVMSSKQFHWQTGQKVRNAKAKRWTKNFVEMERADRENRDLYPVMPSPKGSMWLNYIKHRVKMMKHGICAYSTAKYTRLALDQHIKSSSVVDEWVNKVTDKKPTLFFFGADGEIPPDSPISIKKHVRCPGVRKTLRSIKKRRDCFIQLVDEWGTSQTDARCMNRFQNQNKAARFKRCRCIPDARTLLPTKIVSKLGKTDLSIYRQLQRAMNEEASEEDECLFPKVKCYYKNWQLNLECSVIWHRDVVAAKNILLKGLWTLLGLPIPEAINRYWREAAEAAAAVAAAAAARATAEAAAAAVAIVDNDVEMFEYDQQPADHASAKTFLEQAAQQNIAEFLKALSEVLANVSCSAVARTAAGLQLKNHLTSKDLTVTEQYHKRWLSFDEVTREYIKTNIIQAIGTETSRPSSAAQCVASVAVAEIPVNQWSQCIPTLVNKVVSEGTTERSRESALEAIGYICQDIAPGVLESQSNQILTAIIFGMRKVEPSNHVRLAATNALHNSLEFTKANFDKQAERNYIMEVVCESTQSPDSQISVAALQCLVKILTLYYQYMEPYMAQALFPITLEAMKSDNDQKLKKLVDHRLESQSSTARGALQYLVPVLMEKLTKQEEYDDEDDWNPSKAASVCLMILSSCCEEEIVPFVLPFVKENIKSPNWRFRDAALMSFGSILGGINEQTTKPLVEQAIPTLIELMYDESVTVRDTTAWVFGRVCELCPSAAINEAYLKPLLEALVRGLKAEPRVAANVCWAFTGLVEAAADTENIGEGMQETNCLSQYFEFIVSQLLETTDRQDCGQANLRAAAYEALMDMIKNAPNDCYPVVQKTTMVVLERLNHVLQMESQIQHTDRYQFNDLQSLLCATLQSVLRRVTPDDAPQISDAIMGALLTMFSTSAGKSGNVQEDALMAVSTLAELLGDKFLKYMDAFKPYLYMGLKNHQEHQVCVAAVGLTGDICRVLRNKIAPYCDEIMTLLLENLSLPNLHRNIKPQILSVFGDMALGIGTDFKKYLMIVLQMLQQASTLQVDTNDYEMVEYLNELRESVLEAYTGIIQGLKGTDRAPHPDIELLKNHVPHIIQYLVTIAQDPEMNDSIIAVMAGLVGDLCNAFGPALLAIIDNEHIGKLLQEGRKSRVSRTKQLSSWASKEIKKLREQPIQQIAASSW

SEQ ID NO: 4217 - protein, 1208 aa, Sitodiplosis mosellana
MEFKLKMVLVNPVAPDASWPELLKIKNLETQYKSMDLPIDPSDLSVTEHIYPDRLSYNPYPNFMEKQLNDALEDRAYGYARYNDLSPYQQYDNDLAADESKVSILRDAQCATNGKSCGENEACMQLDSKSLLGICRCNIGYIRNAYQKCVLEEPNLSYNPDNFNEKMMMIKHLTENREDPVDDSKAESGEVDPKIGHLSVSVVSKTVQLPDNKATLSAFPVPDEQTSGATYNYSWSLISQPSGDTNGTMSDKTKSEIELTNLSEGLYRFKVVVSGKNWKGETFANVTVLPEKRFNKAPIVVIKPATQIIKSPTSSAILDGSASTDDDQIKTWRWDLIQGPMNYAPLMTETSTLQLTNLTLPGNYTFKLTVTDSDNITNSTTANITVLKATDYPPSANAVTDGQGLSSSDTVSVIVYPDPLLKNLVEITFAAGVSVLTETEVQSLEQKLVLLLGNNMKLIVRDLRMEQKTGEAILIFYVEQVTGAKENQILTGFDVEVMLKDKLWSGSNIVGMPISDIRTTPPKPKSRYKPSGTKPRGPRAELPRIDPEFKAIVEGLDDYHRIDWPNNKDFCNGLKHLTNQYTDNVVTNLETHANKHITQYLKLKVFQWNSDVGDDAEKFLPSDIASVVNLIIKQKDIKVPIRDPDKLVRCEVLYDIVRDCNVFPEIDLHDLTTDPKHWYKAMPMYLSMQREIEEYNSEWPHQRRPKRKKRKRKKTKGKWKRKRSQMLDNPDFRPLIRNLVVVPMCDFRRTHFRIDCTSMRQVLSSQKLLPKVEIENKKGTISTTIIPGKDFNRDRDYWWNQYFYMRKIRRFVRAKKQFDYSINTDGISVSLQYSAKKKTANKEIDQKSRIIQKIKDGTIKNYSGVDSGVRSWNTTTTHDIETGKETNFVMSSKQFHWQTGQKVRNAKAKRWTKNFVEMERADRENRDLYPVMPSPKGSMWLNYIKHRVKMMKHGICAYSTAKYTRLALDQHIKSSSVVDEWVNKVTDKKPTLFFFGADGEIPPDSPISIKKHVRCPGVRKTLRSIKKRRDCFIQLVDEWGTSQTDARCMNRFQNQNKAARFKRCRCIPDARTLLPTKIVSKLGKTDLSIYRQLQRAMNEEASEEDECLFPKVKCYYKNWQLNLECSVIWHRDVVAAKNILLKGLWTLLGLPIPEAINRYWREAAEAAAAVAAAAAARATAEAAAAAVAIVDNDVEMFEYDQQPADHAV

SEQ ID NO: 4218 - protein, 607 aa, Sitodiplosis mosellana
MGAHAIRGNRSKPRKVEDGKQKEEKAYFAIKLAAASIVRPEYRDLRAATEQAIITGNWEYFDDGDGMHIIENCFYAVLRRYKEDDFIMDPWFRHCFENVDIENRSAWPNNDYFGNLMKYLFQQYGRNVKTNLDTHAQKRLRYFLRLKAFRQNYTNRIRGLPDTYDERDVANAVSWAIKRYDATRGDADRLAKRDRLLLYVRDIRGPADDDIAKFTKDEDRWFASLPMWLTMQSEIETHLNWVEQHHDNIVQVIALPNIKNLVVIPICHHTRKAMNFTINSKKYHYGTAEGVRKEKRERWTRAFGQFEESDRNNRARYDRMPSPKGSNWRDYIRHRLTIMKKAIAVYTTKKYTRLSFDHYIESNRVSDKVAAMLTNRKRCIINIGASQPAANSPIKIKKPVRCPGVRKLVKSFKKMEGNVIRFVNEARSSRLCARCFEPFPLSTLNDRVKVCEWCMPDQDDWPDGMKLPEKIVAAKSKRKLRSERRAMRQAAVQNPNQPRGFVSKVICYRKNWQQNAANGMDDNVEERRGVIIHDAELGIIEYTDEYVPEDPVDDSPVLKTVWQRDISAAKLILYRGHCELFGHRLHDAFTRQHLVYPTRFRVNFNIH

SEQ ID NO: 4219 - protein, 723 aa, Sitodiplosis mosellana
MGYQRKKAKKKGKPIAVLGDVIEEDEKEKDSGIRTVKTQLRAILRPEYRDLLIAAITDRSMMATKICALASQLFLFRCERAFEDNDKGFFEQNGEKLDDSHRVVWPNADYFGNGMNDLIDTYVTNVKNNLKTHSKKRLREWLRVKVFESSLVARYEQADIDRVISLAIFGNDDITINGMDDVAKRERRTLLIGMVTKNSWWDIPDNNIGRFTNGKDWFKSIAFWISLQRKIDDFNTCEEYREERRCQREEFEELKRCRRRNHRPCTCQQPVDRGLNGNEYIEKGPPRVKNLAVIPICSFTRTHFTLDIRTLYFLLRQLGIVPLNITEDEFRKQKEYYWDQYFDMRKIYHLGRSRKKFRFRILSNGQAVSLQFDIDKTKMSNMEPDKKAIVQNYKKFVNEGATDPGVNTWNATTVHNIATGKEGKRWTKDYIKEERQDRENRALYPVMPSPLGRHWEDYIRHRLKMTERGIAVYTTDKYTRLNFDKYVRANSVTDSIAGMLTNHQPTLMHFGAAQMSPSSPIGIKKTLRCPGNRKMIRSYKKCRGCVVNMVDEYYTSQTCAKCFGRFDRRTKRHRFKVCHDCRPQSVVRAMLPSMIVCKVNKRKMRQEKLKLFLLEKEAEEGNGNPAVGNDVPHPDQLNPELLPKVAIYHKIWHVNESSGILEYVKFNSAGEMEVVEPRLHKTTWHRDIAAAKCILIKGHCDLFGFKLPETLQRPSNQRAAVNN

SEQ ID NO: 4220 - protein, 718 aa, Sitodiplosis mosellana
VENNDFALFGGSGEDKIKLCFEQVLWHNNQPPKPKSTYKPSGTKPRGPRAELPRIDPEFKAIVEGLDDYHRIDWPNNKDFCNGLKHLTNQYTDNVVTNLETHANKHITQYLKLKVFQWNSDVGDDAEKFLPSDIASVVNLIIKQKDIKVPIRDPNKLERCSVLYDMVNDLNVFPEIDLHDLTTDPKHWFKAMPMYLSVQREIEEYNSEWPHQRRPKRKKRKRKKTKGKWKRKRSQMLDNPDFQPLIRNLVVVPMCDFRRTHFKIDCSSMHQVLSSQKLLPKVEIENKKGTTSTKTIQQKDFNHSRDYWWNQYFYMRKIRRFVRAKKQFDYSINTDGISVSLQYSAKKKTDNKEIDQKSRIIQKIEDGTIKNYSGVDSGVRSWNTTTTHDIETGKETNFVMSSKQFHWQTGQKVRNAKAKRWTKNFVEMERADRENRDLYPVMPSPKGSMWLNYIKHRVKMMKHGICAYSTAKYTRLALDKHIKSSSVVDEWVNKVTDKKPTLFFFGADGEIPPDSPISIKKHVRCPGVRKTLRSIKKRRDCFIQLVDEWGTSQTDARCMNRFQNQNKAARFKKCRCVPDARTLLPTKIVSKLGKTDLSIYRQLQRAMNEEALVGDERLFPKVKCYYKNWRLNLECSVIWHRDVVAAKNILLKGLWTLLGLPIPEAINRYWREAAEAAAAVAAAAAARATAEAAAAAVAIVDNDVEMFENDQQPADHAV

SEQ ID NO: 4221 - protein, 489 aa, Sitodiplosis mosellana
MYEYIQKDWFESLWMWIGMQRIVEKFSIDTAHLRQQWKAYDRDPVNNREPSVPKIPKVKNFAAIPLSDTKLKHIPFDHNDLIVIIGQLRNERGWDIRADYRTYYKQGENKDEAWGIVFDMDKIRQLRTGSKEFYHKIQTNSSAVSVLFSRPKRKGAGVTMEQIKAKYEKPVSKGGYMYESGIDPGQKTKMACVRRTLATGTETNIKLSSIQYHWGARQGMRNKQATKMTRKYVHKEQRDLKSYPITSVSPRGSQWKSFIKHKIKMLTDSLATYARRKYAQLSLHKYIESNCEMDLMAKHITNNETGVVFLGDAAFPSNSKIGVKRTKRSPDQRKFIVSLKKNGKTDVVLTPEPYTSQTCANCLRRFPRSTKSDRFKVCKDCRPHKDVRLPPVIVTDRSRRRKQNDRKQNASKKPTANVTRAEKAEKHREKRRSERESHNPEQLDTEQAVRRYNRRIRRRELRQRRRVAGHRSRKVTKQPEAESDLPGFD

SEQ ID NO: 4222 - protein, 558 aa, Sitodiplosis mosellana
MYEYIQKDWFESLWMWMGMQRIVEKFLIDTAHLRQQWKAYDRDPVNNREPSVPKMPKVKNFAAIPLSDTELKHIPFDHIDLIDIICQLRKERGWNIRADYRTYYKQGENKDEAWGIVFDMDKIRRLRTGSKDFYHKIQTNSSAVSVLFSRPKRKGAGVTLEQIKAKYEKPVSKGGYMYESGIDPGQKTKMACVRRTLATGTETNIKLSSIQYHWGARQGMRDKQAKKMTSKYVHKEQRDLKSYPIASVSPRGSQWKSFIKHKIKMLTDSLATYARRKYAQLSLHKYIESNREMDLMAKHITKNETGVVFLGDAAFPSNSKIGVKRTKRTPDQRKFIVSLKKDGKTDVVPTPEPYTSQTCANCLRRFPRSTKSDRFKVCKDCRPHKDVRLPPVIVTDRSRRRKQRDRKENASQKPTANVTRAERAGKHREKRRSERESHNPEQLDTEQAVRRYNRRIRRRELRQRRRVAGHRSRKVTKQPEAESDLPDYDDDELVSQCFEFYESVITENNLITTFVMQKLAEHPEIQERLYDEMVEIESRLDGNELSYDGLNTMKYTEM

SEQ ID NO: 4223 - protein, 764 aa, Sitodiplosis mosellana
LDPANYYTAPGLSWDAMLKYTGVRIELLSDVEMLLFIERGIRGGISVENNDFALFGGSGEDKIKLCFEQVLWHNNQPPKPKSTYKPRGEKPRGPRAELPRIDPEFKAIVEGLDDYHRIDWPNNKDFCNGLKHLTNQYTDNVVTNLKTHANKHITQYLVLKVFELNSNLEEDGEKFLPSDIENVVKLIIKQKDIKVPIRDPDKLVRCEVLYDIVRDCNVFPEIDLHDLTTDPKHWYKAMPMYLSMQREIEEYHAMWPHQHRSKRKKRKRKKKKGKWKRKRRQMLDNPDFRPLIRNLVVVPMCDFRRTHFKIDCSSMHQVLSSQKLLPKVEIENKKGTTSTKTIQQKDFNHSRDYWWNQYFYMRKIRRFVRAKKQFDYSINTDGISVSLQYSAKKKTANKEIDQKSRIIQKIEDGTIKNYSGVDTGVRSWNTTTTHDIETGKETNFVMSSKQFHWQTGQKVRNAKAKRWTKNFVEMERADRENRDLYPVMPSPKGSMWLNYIKHRVKMMKHGICAYSTAKYTRLALDKHIKSSSVVDEWVNKVTDKKPTLFFFGADGEIPPDSPISIKKHVRCPGVRKTLRSIKKRRDCFIQLVDEWGTSQTDARCMNRFQNQNKAARFKKCRCVPDARTLLPTKIVSKLGKTDLSIYRQLQRAMNEEALVGDERLFPKVKCYYKNWRLNLECSVIWHRDVVAAKNILLKGLWTLLGLPIPEAINRYWREAAEAAAAVAAAAAARATAEAAAAAVAIVDNDVEMFENDQQPADHAV

SEQ ID NO: 4224 - protein, 268 aa, Sitodiplosis mosellana
MDEIIKLVKNKKEFGDSIISDGVSASVLFKLLKQSKTLTDEEEVETKRKYFANEFAYALEIDPGMRTFIASVRLDLQTGEETNEKISFKQYHQKSKQDARNIKAERMTRVFAYDEQADLKRIAAEIGQTPSPRNISWRHYIEHRLRMSQDGIAAYSQKNYARLRLDKHIEWRRAIDLIAGKLVHFKTAIIKRVLQMQRKIMRTWEEMRDQGDAIAAILTQRNSGRLVSKKQRFFKSWQPNAAGTEDAAQSRKLLKSLWHRDISAAKLI

SEQ ID NO: 4225 - protein, 455 aa, Sitodiplosis mosellana
MSLRRGLKTDKNEKAKKDVNAEVTRLIENCVLEMTRCIIFAALNIHCFLSHFVATESDEAVAAFSCQIIDKNFFLDFYRGVQFVGSGTDGGFKLYAPLSDMCRRYNVIAPNLTGFGNIVQYAFQMYFTNFKNNMWMHAYKRMKKYCKVYQQDKKIITDTLHYLFYEKFGDGKGYFMNMKEGNSKWFKYVPLFMRLQQFIRENNRQRRAEIRRGERPTHRKIKNFTVIPSSPFKRHYIRIDRDAFHCLLKVERTPKNEHCAQVQFDNAIITDGVAACFQMLRTKVVYETDEEERLKDIQQKLRSAQQVYGIDPSLRLVLGGVRRNYDARKKRRVLTRQIDEQMKSYRERFDDRPGPRSTDYNVYADHILRHFNAKFDAYTQCEYALQDLLQYIATERELDKLASQLINGKQTFVFAGDATLPGSSSLAKGVDCVEVFYQWFKNFEILEISIFGPSV

SEQ ID NO: 4226 - protein, 801 aa, Sitodiplosis mosellana
MGDNLYTLWCKEPAPNHDLYVEICSTEYGRSTNDKTMKKNNVTAKKLRDKGNELYSKKKYHDAMAYYNQSISYAENNSEALALAYANRSTCFLNLNLFQECLIDIERARIGYPSSQMSKLDNREQKCMDLMNKIGNESHVREPELSFNENGMHPGVADCLKIEKNSKFGRHVVTTRDLEIAQTILVEMPFAFKNEPIKPDHSMQYDPFVDKSRIIQHDRSGDNTFGRCMYCYVECTNLIPCENCAGVLFCDEVCMKKAYHKNDCQMADSSRKETLGMVLRMLYRTNDAFPCVNELMTTVRLLLDGNNVNWHQNDDQRNFSLIFQLPTHSGHQWSRNLKLTRTVTEVIYNKVMRLPDFKGKFTSSTHRRFLQHLILHLFHVAEHAINASEYWRESDDQNLGSFDVRTFGNGMYPFGCYINHSCTPNVCWYFVDHRLICRVIRPIRKNQQLFGFYFPSTLCEHIPHQNRGLLLEYHYFFKCKCKLCLNPNWSIFTGKDLSEGPLYEKAIEPTWMDLDEIRKLTTEELVSYEREAAKFLAKYDPKTDGVVLNLLFRRPQQESVDHHDRIQAEFDAGEIRNLVAIDAGTMLVITFKRIEPMHGFRETNSYLSNKRYQALQESQKHNAEIAKESAEYLKLDNSLRAGCKKEFGEVASSRSRNFHLHTFHRMHTFNLGMGTRVEPKDIARRDFEYYRKRQSIAARVANEIANGEKTLLALSPTTPIYVKSPIRGYIRAPLKLLDHSLQNHPLITVVDQRENYSTQICSYGFKQLVIPRQKGSFNAVTAIDLQIKSCCRRRNTEESKC

SEQ ID NO: 4227 - protein, 755 aa, Sitodiplosis mosellana
MELRQFDVKTAFLNGDLSEEIYMEQPAGFTDGTNRVCVENNDFALFGGSGEDKIKLCFEQVLWHNNQPPKPKSTYKPRGEKPRGPRAELPRIDPEFKAIVEGLDDYHRIDWPNNKDFCNGLKHLTNQYTDNVVTNLKTHANKHITQYLVLKVFELNSNLEEDGEKFLPSDIENVVKLIIKQKDIKVPIRDPDKLVRCEVLYDIVRDCNVFPEIDLHDLTTDPKHWYKAMPMYLSMQREIEEYHAMWPHQHRSKRKKRKRKKKKGKWKRKRRQMLDNPDFRPLIRNLVVVPMCDFRRTHFKIDCTSMRQVLSSQKLLPKVEIENKKGTTSTTIIPEKDFNRDRDYWWNQYFYMRKIRRFVRAKKQFDFSINTDGISVSLQYSAKKKTVNKEIDQKSHIIRKIKDGTIKNYSGVDSGVRSWNTTTTHDIETGKETNFVMSSKQFHWQTGQKVRNAKAKRWTKNFVEMERADRENRDLYPVMPSPKGSMWLNYIKHRVKMMKHGICAYSTAKYTRLALDKHIKSSSVVDEWVNKVTDKKPTLFFFGADGEIPPDSRISIKKHVRCPGVRLTLRSIKKRRNCFIQLVDEWGTSQTDARRMHRFENQNKAARFKKCRCIPDARTLLPTKIVSKLGKTDLSIYRQLQRAMNEEASEEDECLFPKVKCYYKNWRLNLECSVIWHRDVVAAKNILLKGLWTLLGLPIPEAINRYWRKAAEAAAVVAAAAAARATAEAAAAAVAIVDNDVEMFEYDQQPADHAV

SEQ ID NO: 4228 - protein, 290 aa, Sitodiplosis mosellana
MHRRNNDKEQQQQQQRSVNIKAGTKPKAVDDDDDDDAAAAAAAKKEKENRRKKLQECDREVVLDVGKRLMICGVIIDHTTGDYRHLKFSSHEYDRMCKKQVFKKPREAITNQIDDEMKKDREAIAKTSSANNLQPSSRSPDFETYARHTLKYFTRAMAAYGSKEFAKIDYDAWAQTRSTLVYIARMIVGRSKYVVVIVGDKLPEANSLGFGYSTTKVHGLFKLLDEHPQCTVYYGSEHRTSKCCCRCGQVLLDARMGESRSLENLLEGGSSTAGSSQTNGKESHQSLFDV

SEQ ID NO: 4229 - protein, 1460 aa, Sitodiplosis mosellana
MLPMKHFDEIEKEALEMLRSSTDSSDSNAKKVVDIKENAIDKNEKSLSDDEYDDEYDYTNDDIDSDSDEIVSITPKPVTVSTTRKASKTTKIVVNTSSKPEVVATEKAKPSTPNPKLKYISDVDSGIDDDYNDNDEDDDDDDDDEDEDTDDPITSNEPVVCPRDCICSRNMNGFMVATCSRLDAGIQNFSAGITDLEVVNVSPQYPIVLGASFFKLVGLEHVSSIKIVNSFIANIHPKAFEGLVELYSVNLTNSGITILHPDTFAENAKLRLLSLDANDLSQMQQNQAPFNDYMLKAPSVEELSLSRCNLKKLLPTAFDRLENTIFINLANNDLQSLPPNLFDKVTNIEELDLSSNKISTLPKNIFAKTSLAILNLKYNQIESKLDFATSEIQKLDLSYNNISNVGNMMFNELTGLTTLLLKGNGIKKIHQTSFFPLKNLRQIDLSYNDLEQVSSTLFLVNKELDVIRLNDNYRLKSLPLEGFACESGKFNVYLFDLQNCDISELGDDTFKNMPRMTTLNLAWNNIETLTREFFKSMTKLIELNLSNNVISELENLTFLNNRNLKKLNLAGNQLQKISPRMFLPLKDLTELDLSSCDLVEIWSEQISANLPTSTVLKNLKLLNVSNNNIIHARHSHFSSMEKLEVLDLSNNHLHCDDGFKNLIQWLKDRKIKAGNIHAGFNAELTENGHAVDSSASYSLGWESFATNVCAAHQSTNVDSKATAKTDEYADESVDNSDSDDEDDEEEDDTDESTQATKESASGNTEAEDLDSDEEEYDDDNDNEIEINSGNELRDKDKIIAEEIDGLNDRIIDHCFNCVTSNNIKDPLTAQMPDAFLAMVTQGSPNFEWPRRHQMTRQVYALKDQYVANVKTNLETHCWEVSQLCGPSFVKCFTMYEYIQKDWFKSLWMWIGIQRIVEKFSIDTAHLREQWKAYDRDPVNNREPSVPKIPNVENFAAIPLSDTKLKHIPFDHNDLIDIIGQLRNERGWDIRADYRTYYKQGENKDEAWGIVFDMDKIRQLRTGSKEFYHKIQTNSSAVSVLFSRPKRKGAGVTLSEIKAKYEKPVSKGGYKYESGIDPGQKTKTACVRRTLATGIETNIKLSSIQYHWGARQGMRDKQATKMTRKYVHKEQRDLKSYPITSVSPRGSQWKSFIKHKIKMLTDSLATYARRKYAQLSLHKYIESNREMDLMAKHITNNETGVVFLGDAAFPSNSKIGVKRTKRSPDQRKFIVSLKKNGKTDVVLTPEPYTSQTCANCLRRFPRSTKSDRFKVCKDCRPHKDVRLPPVIVTDRSRRRKQRDRKQNASQKPTANVTRAEKAEKHREKRRSERESHNPEQLDTEEAVRRYNRRIRRRELRQRRRVAGHRSRKVTKQPEAESDLPGFVKIGDTSICKIRVKNRKAKPQLWQRIHYDATDKGIGLLGSKKIAFQKNWHSSPMNDQNAFTATWHRDICAAKCILYRGM

SEQ ID NO: 4230 - protein, 772 aa, Sitodiplosis mosellana
MGRKRIGAHAIRGNRPKPRKVEDGKQKEEKAYFAIKLAAASIVRPEYRDRVLPWITKTSIKCTEISELASLLFLNKVRVATEEAIITGNWEYFDDGDGMHIIENCFYAVLRRYKEDDFIMDPWFRHCFENVDTENRSAWPNNDYFGNLMKYLFQQYGRNVKTNLDTHAQKRLRYFLRLKAFRQNYTNRTNGLPNTYDERDVANAVSWAMKRYDATRGDADRLAKRDRLLLYVRDIRGPADDDIAKFTKYDDTWFASLPMWLIMQSEIETHLNWVEQHHDNIVQVIALPNIKNLVVIPICHHTRKAVRIDADVLYRMMCETGTIPRDEYGRQHTVGHVTSKSNQAYYFNMIFNMEKINRLLKANKKFEHILSDGVSASILYTVKKTVVDKLVEDGLVRKRYSDGFYVYELGIDWGMKTWNATVRRRINNDKERIHNGKEMNFTINSKKYHYGTGEGVRKEKRERWTRAFGQFEENDRNNRARYDRMPSPKGSNWRDYIRHRFTIMKKVIAVYTTEKYTRLSFDHYIESNRVSDKVAAMLTNRKRCIINIGASQPPANSPIQIKKHVRCPGVRKLVKSFKKMEGNVIRFVNEARSSRLCARCFEPFPLSTLNDRVKVCEWCIPDQDDWPDGMKLPEKIVAAKSKRKLRSERRAMRKTAVQNPNQPRGFVSKVICYHKNWQQNAANGMDDNVEERRGVIIHDAELDIIEYTDEYVPEDPVDDSPVLKKVWQRDISAAKLILYRGHCELFGHRLHDAFTRQHLVYPTRFRVNFNIH

SEQ ID NO: 4231 - protein, 663 aa, Sitodiplosis mosellana
MKRKRAQNGRPRSVKLSLNSVLRDQYRANFVAQVTNWCHTATVITVLASLLFLFENNRAFDEDNHDFFRGNGYELIKDCFKNILNENRHKLPLAFRQIIETAVPNFRWPQREGMHNAFNQLIDQYTTNVKNNIKTYSYTRIKTFFVLQRYELNLLGHNISDIDVKNATKAVMFNNIVPSANVERLLEQARMIGIPVGTKLCDLVRGSWFQTIPIFITIQRLVFNRHERYELLNDLWRRYYRDRLHNAMPSIARPPKIKNFRVIPIHDFKMKHIRIDIHLFYQMACKLGAIKLAKGLFGQPVNISKKVYDSNPLVSWDTIFNMDKIQKVGNRKTFDYTIVTDSVAVSLCFLKPECPSHEYSHEQINEMYENGVFRFVLGMDPGVRTWNATVRKHIASGVEPGMEVYTARKYIRLNLDKHIEETRASDTIAAFLTRKLPSLIFLGAAQMAPNSPIGIKKRLRCPGVRKLLNSFKKLHNCVVVMVDEFKTSQTCAKCFRPFDRRTKKDRYKVCRQCIPHAANITTDKHLSSVIISNKSNRLYQREQRHVVAEYERLNVHPVYSHGLVPKLNVWFKNWQLNTDNTWNDSRHPHQQNTVWHRDEVAAKCILYKGLCMIKGLDVHPQLSRQHHAAAAAAHNNAEGDQDDNDSDSDDDYVYVLDDVSDEE

SEQ ID NO: 4232 - protein, 633 aa, Sitodiplosis mosellana
MLFGLLLIETNKSGAAPATVITVLASLFFLFENNRAFDEDNHDFFRGNGYELIKDCFKNILNENRHKLPLAFRQIIEAAVPNFRWPQREGIQNAFNVPINQYTTNVKNNIKTYSYTRIKTFFVLQRYELNLLGHNISDIDVKNATKAVMFNNIVPSANVQRLLEQARMIGIPVGTKLCDLVRGSWFQTIPIFITIQRLVFNRHERYELLNDLWRRYHRDRLHNAIPSIARPPRIKNVRVVPIHDFQMKHIRIDIHLFYQIACKLGVIKLAKGLFGQPVNISKKVYVSNPFVSWDTKFNMDKIKKVGNGKTFDYAIATDSVAVSLCFLKPECPSHEYSHEQINEMYENDVFRFVLTMDPGVRTWNATVRKHIASGVEENITIDDPKYHFRAKYGKRKRKSEKWLRLFTELEQHDRNQYPFYPSPKGASNWMSYIEHRVKMLQPGMEVYTARKYIRLNLDKHIEETRASDTIAAFLTRKLPSLIFLGAAQMAPNSPIGIKKRLRCPGVRKLLNSFKKLNNCVVVMVDEFKTSQTAETQCMVQKLAAKHWQLTHGTIHVIHINRTLFGIGMKSLPSAYCTKVFCMIKGLDVHPQLSRQHHAAAAAAHNNAQGDQDDNDSDSDDDYVYVLDDVSDEE

SEQ ID NO: 4233 - protein, 596 aa, Sitodiplosis mosellana
MVLTEVLALGNGYELIKDCFKNILNENRHKLPLAFRQIIETAVPNFRWPQREGIQNAFNAPINQYTTNVKNNIKTYSYTRIKTFFVLQRYELNLLGHNISDIDVKNATKAVMFNNIVPSANVQRLLEQARMIGIPVGTKLCDLVRGSWFQTIPIFITIQRLVFNRHERYELLNDLWRRYHRDRLHNAIPSIARPPRIKNVRVVPIHDFQMKHIRIDIHLFYQIACKLGVIKLAKGLFGQPVNISKKVYVSNPFVSWDTKFNMDKIKKVGNGKTFDYAIATDSVAVSLCFLKPECPSHEYSHEQINEMYENDVFRFVLTMDPGVRTWNATVRKHIASGVEENITIDDPKYHFRAKYGKRKRKSEKWLRLFTELEQHDRNQYPFYPSPKGASNWMSYIEHRVKMLQPGMEVYTARKYIRLNLDKHIEETRASDTIAAFLTRKLPSLIFLGAAQMAPNSPIGIKKRLRCPGVRKLLNSFKKLNNCVVVMVDEFKTSQTAETQCMVQKLAAKHWQLTHGTIHVIHINRTLFGIGMKSLPSAYCTKVFCMIKGLDVHPQLSRQHHAAAAAAHNNAQGDQDDNDSDSDDDYVYVLDDVSDEE

SEQ ID NO: 4234 - protein, 767 aa, Sitodiplosis mosellana
MTQIEVPDLPIKLKHKDEAESQEALSQWMDYIKRATLKGGTSNIDPMLVDRIENKDLFSETDSSEDESELANGDTLQPILFRKAILGSGKMGYQRKKTRKKPKPIAVLEDVIKEDNEKEENEKDSGIRTIKTQLRSILQPEYRDFLIAAITDRSMMATKICALASQLFLFRCERAFDDNDKAFFENNGEKVIRSCFYGVLKKNIYKKKKMPPEFRKMVHQLDDSHRVTHSKKRLREWLRVKVFESSLVARYEQAYIDRVISLAIFGNDDIEINGMDDVAKRERRNLLIEMVTKNSWWDIPDNNIGLFTNGKNWFKSIAFWISLQREIDDFNTCEEYREERRCQREEFQELKRCRSRNHRPWTCQQPVDRGQNGNEYIEKGPPRVKNLAVIPICSFTRTHFTLDNKTLYYLLRQLEIVPLNITEDEFRKQKEYYWGQYFDMRKIYHLGRSRKKFRFRILSNGQAVSLQFDIDKTKLKPVDKKAIAQNYKEFVNEGGTDPGVNTWNATTVHNIETGKEGKRWTKDFVKEERQDRESRALYPVMPSPLVRSSKLVTDSIAGMLTNHQPSLMHFGAAQMSPSSPIGIKKTLRCPGNRKMIRSYKKCPGCVVNMVDEYYTSQTCAKCFGRFDRRTTRHRFKVCHDCRPVEGAMLPSMIVCKVNKRKMRQEKLQNMAINMFVKSEFVIEDYSQIVDRGTLKQWKVINEVNWDRWEAISDLHYFCYSSMIKDIVDEMDDVFISLFADDVKIAKIIHGCWSDTTGHRQTEGLVRR

SEQ ID NO: 4235 - protein, 460 aa, Sitodiplosis mosellana
MRCYELNHMCLCGDLELDELFDGDDIKNAINYTYNRRDSTRGNANAIRKLEILLAELYWIGAPYRPDDPHPFNIREFVELNWFQALRMFVNIQRDIHNFHLSFANLRQSWNLFRKYPLYVQEPEFLEPPEIITVIPKCTFQRRHVKIDTDSLHNILCGIKAMKREDGLRVNKKGEVLQRYISPNEFKRIGSWRSYFNMDDINKLVKNKKEFGDSIISDGVSASVLFKLPKQSKTFADEEEAETKRKYFANEFAYALGIDPGMRTFIASVRLDLKTGEERLARHHRHGTSLGAITSNIACECHIEWRGAIDLIAGKLVHFKTAIINIGAAEISPNCPIRIKKYVRCPGVRKLIPAFKRRGNCVVRLVYEYMTSQHCARCFKRFPTWTKSKRYKKCNDCQPDGRVGLPRTIYTNVSKRVLQMQRKIMRTWEEMRDQGYAIAAILTQRNSGRLVSKKQRFFKS

SEQ ID NO: 4236 - protein, 348 aa, Sitodiplosis mosellana
MDEINKLVKNKKEFGDSIISDGVSASVLFRLPKQSKTVVDEDEAETKRKYFANEFVYALGIDPGMRSFIASVRLDLKTGEEVGSGGTNEKISFKQYHQKSKQDARNIKAERMTRVFTYDEQADLKRIAAESGQTPSPRSISWCQYIEHRLRMSQDGIAAYSQKNYARLRLYKHINVGAAEISPNCPIRIKKYVRCPGVRKLIPAFKRRGNCVVRLVDEYMTSQHCARCFKRFPIWTKSKRYKKCNDCQPDGRVGLPRTIYTNVSKRVLQMQRKIMRTWEEMRDQGYAIAAILTQRNSGRLVSKKQRFFKSWQPNAAENAGTEDAAQSRKLLKSLWHRDISAAKLIVYK

SEQ ID NO: 4237 - protein, 707 aa, Sitodiplosis mosellana
MDETWIHHYTPESSQQAKEWMKLGSPPAKRPKTQQWAGKVYYTISSKQYHYWTKQKVRNRQGKRWTKDLIKEERRDRENRALYPVMPSPLGRHWKDYIRHRLKMTERGIAVYTTDKYTRLNFDKYVRSNSVTDSIAGMLINHQPSLMRFGAAQKSPSSPIGIKMTLRCPGNRKMLRSYKNALAVWDRRTKRHRFKVVQAMLPSMIVCKVNKRKMRQEKLKVFLLEKEAEEGNGNPAVGNDQLNPDLLPNVAIYYKTWQVNGTSGILEYVNVNRADDMEVVEPRAHKTTWHRDIAAAKCTLIKERLLDLFFTNDFTDITIERVDKANALKKKVECHHPPIMATFEWHGINTTEANITTKAFNFKRANYRDMNAHLANVNFTELFHGKTITEKVNLLHKTLDDAIIKFVPTYIVKSIQKCPWKNQFLITLKNKKNKVWKRYRRSGYHQSFEWKYILASREFDKLNTELYNTYVDKMKSSLKHYASRFWQYVNSKKSTDNKPKVMQLGDVRTANESERANLFANFFSSNYDNSTTQGVQQSPADDSQQTEEFQLDINFVLQELQALNTKKGTGPDGMHPLILKNCASRLAAPLEAPLTEIFNESLSTGHFPDKWKPSSVSPIFKKGARSTIETYRCIAKLQTVAKFFEHLVNVKLLSLVQDKITKKQHGFMKSRSTASNLTEFTYYAQRGINSGAQVDVLYTDFSKTVIP

SEQ ID NO: 4238 - protein, 714 aa, Sitodiplosis mosellana
MPKRKGTPLRGNQRKKKKIVSKTGIEGEIGILAIKMTLKAIVRPQYYQQVKDWFTQKSIECTKICALASLLFLYKVKSANESNNADFFSGDGNKEIKDCFYAVLQKNKEKEEMVPDFRDFVENMEAENRFSWPGNSFFGNQMQYLYKQYTTNLRNNLEMHAERRLYQYLIMRAWQFNAVSTGPTLRNDDIKRAVQWTIDRYDPIKTTDRHWEVKWEKRQLLLDMIAEIGGPEDNDVAIYTTSEGTWFKSINMWLTMQMEVDNFHIWAEENGIEIPKIKNLKVIPIHQFMRQHVKMETDVLIRMMSEMRFRLHGLIIKYEIVEDPMTQCWDEIFDMPKIHRLLKSNKRFRPYIASNGQAVSIMYEVPKSHLDRLVDDEIVRKRYRDGVYVYEIGIDPGMRTWNATVRRNIKTGKEINFTVSSKRYHYLARQGVRDRKAKRWTRRFVAEEQHDRERYQRMPSPKGENWGSYIAHRLTMLKKGIETYTTEKYAHLQFDKYIQSNRATDKIANLLTNRKPSIIHMGAVDMPANSPIRIKKHVRCPGNRKLAKSFRKIPNTVVRQVNENRTSQLCGRCFTPFDIATQRDRMKVCEWCLPDNDDWPPNLQLPTKIVSKKSKRTLIADRQRMREAVEQDPNQAERFVSKVISYQKNWQQSAAIDEDADPAEQEDAAESHDRRILKTCWHRDITAAKLILYKGHCHLFGIQLHFMFTIERIR

SEQ ID NO: 4239 - protein, 457 aa, Sitodiplosis mosellana
MSNMESDKKAIVQNYKKFVNEGGTDPGMNTWNATTVHNIETGKETNYTISSKQYHYWTKQKVRNRQGNRWTKDFVKEERRDRKNRALYPVMPSPLGRHWKDYIQHRLKRTERGIAAYTTDKYTRPNLDKFDQTVSPIGIKKTLRCPGNRKMIRSYKKCPGCVVNMVDEYFTSRTCAKCFGRFDRRTKRHRFKVCHDCRPQPERAMLPSMIMCKVNKRKMREEKLKVFLLEKEAEEGNGNPAVGNDVPHPDQLNPDLLPNVAIYYKTWQVNGSSGILEYVNVNRADEMEVVEPRAHKTTWHRDIAAAKCTLIKVAELRMLKILGVDCVGMSTVHEVITARHCDMKAFAFSIITNKCVTEYESNEEPGHEEVVEVGKSRQYLLASLSILGPVHFASDVHFSVRSKSWYLNLISHRLSDLVNSLVMLNHYLKCLMVMEALAVPGAMGLFPEEKVFVELRF

SEQ ID NO: 4240 - protein, 357 aa, Sitodiplosis mosellana
MDEIVKLVKNKKEFGDSIISDGVSASVLFKLPKQSKTVADEEEAETKCKYFANEFAYALEIDPGMRTFIASVRLDLKTGEETNEKISFKQYHQKSKQDARNIKAERMTRVFTYDEQADLKRIAAEIGQTPSPRNISWRHYIEHRLRMSQDCIAAYSQKNYARLRLDKHIEWRRAIDLIAGKLVHFKTAIINIGAAEISPNCPIRIKKYVRCPGICKLIAAFKRRGNCVVRLVDEYMTSQHCARCFKRFPIWTKSKRYKKCNDCQPDERVGLPRTIYTNVSKRVLQMQWKIMRTWEEMRDQGDAIAAILTQRNSGRQRSNASSKPGNQMLLKTLEQKTLHNHASCSNHFGIGTYQQPN

SEQ ID NO: 4241 - protein, 768 aa, Sitodiplosis mosellana
MGAHAIRGNRSKSRKVEDGKQKEEKAYFAIKLAAASIVRPEYRDRILPWITKTSIKCTEISELASLLFLNKVRAATEQAIITGNWEYFDDGDGMHIIENCFYAVLRRYKEDDFIMDPWFRHCFENVDIENRSAWPNNDYFGNLMKYLFQQYGRNVKTNLDTHAQKRLRYFLRLKAFRQNYTNRIRGLPDTYDERDVANAVSWAIKRYDATRGDADRLAKRDRLLLYVRDIRGPADDDIAKFTKDEDTWFASLPMWLTMQSEIETHLNWVEQHHDNIVQVIALPNIKNLVVIPICHHTRKAVRIDADVLYRMMCGTGTIPRDEYGRQHSGSDVTSKSNQAYYFNMIFNMEKINRVLKANKKFEHILSDGVSASILYTVKKTVVDKLVEDGLVRKRYSDGFYVYELGIDWGMKTWNATVRRRINNDKERIHNGKEMNFTINSKKYHYGTAEGVRKEKRERWTRAFGQFEESDRNNRARYDRMPSPKGSNWRDYIRHRLTIMKKAIAVYTTKKYTRLSFDHYIESNRVSDKVAAMLTNRKRCIINIGASQPPANSPIQIKKHVRCPGVRKLVKSFKKMEGNVIRFVNEARSSRLCARCFEPFPLSTLNDRVKVCVWCEPDQNDWPDGMKLPEKIVAAKSKRKLRSERRAMRQAAVQNPNQPRGFVSKVICYRKNWQQNAANGMDDNVEERRGVIIHDAELGIIEYTDEYVPEDPVDDSPVLKTVWQRDISAAKLILYRGHCELFGHRLHDAFTRQHLVYPTWIRHANINIH

SEQ ID NO: 4242 - protein, 401 aa, Sitodiplosis mosellana
MRKIYHLGRSRKKFRFRILSNGQAVSLQFDIDKTKMSNMEPDKKAIVQNYKKFVNEGATDPGVNTWNATTVHNIATGKEANYTISSKQYHYWTKQTVRNRQGKRWTKDFVKEERQDRENRALYPVMPSPLGRHWEDYIRHRLKMTERGIAVYTTDKYTRLNFDKFVRSNSVTDSIAGMLTNHQPTLMHFGAAQMSPSSPIGIKKSLRCPGNRKMIRSYKKCRGCVVNMVDEYYTSQTCAKCFGRFDRRTKRHRFKVCHDCRPQLVRAMLPSMIVCKVNKRKMRQEKLKLFLLEKEAEEGNGNPAVGNDVPHPDQLNPELLPKVAIYHKIWHVNESSGILEYVKFNSAGKMEVVEPRVHKTTWHRDIAAAKCILIKGHCDLFGDELPETLQRPSNQRAAVNN

SEQ ID NO: 4243 - protein, 668 aa, Sitodiplosis mosellana
MYEPRQDRAIANGCFGAHAIRGNRPKPQKVEDGKQKEEKAYFAIKLAAASIVRPEYRDRVLPWITKTSIKCTEISELASLLFLNKVRVATEQAIITGNWEYFDDGDGMHIIENCFYAVLRRYKEDNFIMDPWFRHCFENVDTENRSAWPNNDYFGNLMKYLFQQYGRNVKTNLDTHAQKRLRYFLRLNAFRQNYTNRANGLPDTYDEGDIKNAVSWAMKRYDATSGDADRLAKRDRLLLYVRDIRGPADDDIAKFTKDENTWFASLPMWLIMQSEIETHLNWVEQHHDNIVQVIALPKIKNLVVIPICHHTRKAVRIDADVLYRMMCETGTVPRDEYGRQHTVGHVTSKSNQAYYFNMIFKMEKINRVLKANKKFEHILSDGVSASILYTVKKTVVDKLVEDGLVRKRYSDGFYVYELGIDWGMKTWNATVRRRINNDKEMNFTINSKKYHYCTGDGVRKKKRERWTRAFGQFEESDRNNRARYDRMPSPKGSNWRDYIRHRFTIMKKAIAVYTTKKYTRLSFDHYIESNRVSDKVAAMLTNRKRCIINIGASQPPANSPIQIKKHVRCPGVRKLVKSFKKMEGNVIRFVNEARSLRLCARCFEPFPLSTLNDRVKVCEWCMPDQDDWPDGMKLPEKMVAAKSKRKLRSERRAESSSAESKSTPLFCV

SEQ ID NO: 4244 - protein, 690 aa, Sitodiplosis mosellana
MQSTVSSRDDDFDNDFFNSNGDEIIKMCFQGVLRQNYTNDRMFMVPGFRQIVIKILGEWFPWPMNRFFGNTFKYLYEQYATNVKTNLKTHCEKRSRKFFKMRCYELNHMCLCGDLELDELFDGDDIKNAINYTYNRRDSTRGNANAIRKLEILLAELYWIGAPHRPDDPHPFNIREFVELNWFQALRMFMNIQRDIHNFHLSFANLRQSWNLFRKYPLYVQQPEFPEPPEITTFTVIPKCTFQRRHVKIDTDALHNILCGIKAMPRTKGTRVLRNGEYQQRWISQTEFKERGGWRLFFNMDEIIKLVKNKKEFGDSIISDGVSASVLFKLPKQCKTVADEDEAETKRKYFAGKFAYALGIDPGMRTFIASVRLDLKTGEETNEKISFKQYHLKSKQDARNIKAERMTRGFTYDEQADLKRIAAEIGQTPSPRNISWRHYIEHRLRMSQDGIAAYSQKNYARLRLDKHIEWRRAIDLIAGKLVHFKTAIINIGAAEISPNCPIRIKKYVRCPGVRKLIAAFKIRGNCVVRLVDEYMTSQHCARCFKRFPIWTKSKRYKKCNDCQPDERVGLPRTIYTNVSKRVLQMQRKIMRTWEEMRDQGDAIAAILTQRNSGRLVSKKQRFFKTWQPNAAENAGTEDAAQSRKLLKSLWHRDISAAKLIMYKGLCTLLDIPIHPALLRRPDDDGVPLNP

SEQ ID NO: 4245 - protein, 728 aa, Sitodiplosis mosellana
MKRKRAQNGRPRSVKLSLDSVLRDQYRANFVAQVTNWCHTATVITVLASFLFLFENNRAFDEDNHGFFRGNGYELIKDCFKNILNENRHKLPLAFRQIIETAVPNFRWPQREGMHNAFNQLIDQYTTNVKNNIKTYSYTRIKTFFVLQRYELNLLGHNISDIDVKNATKAVMFNNIVPSANVERLLEQARMIGIPVGTKLCDLVRGSWFQTIPIFITIQRLVFNHHERYELLNDLWRRYHRDRLHNAMPSIARPPKIKNFRVIPIHDFKMKHIKIDIHLFYSMACKLGAIKLAKGLFGQPVNISKMVYDSNPFVSWDTIFNMDKIQKVGNRKTFDYAIVTDSVAVSLCFLKPECPSHEYSHEQINEMYENGVFRFVLGMDPGVRTWNATVRKHIASGVEENITIDGPKYHFRAKYGKRKRKSEKWLRLFTELEQHDRNQYPFYPSPKGASNWMSYIEHRVKMLQPGMEVYTARKYIRLNLDKHIEETRASDTIAAFLTRKLPSLIFLGAAQMAPNSPIGIKKRLRCPGVRKLLNSFKKLHNCVVVMVDEYKTSQTCAKCFRPFDRRTKKDRYKVCRQCIPHAANITTDKHLSSVIISKKSNRSYQRERRHVVAKYERLNVHPVYSHGLVPKLNVWFKNWQLNTDNTWNDSRHPHQQNTVWHRDEVAAKCILYKGLCMIKGLDVHPQLSRQHHAAAAAAQNNAEGDQDDNDSDSDDDYVYVLDDVSDEE

SEQ ID NO: 4246 - protein, 651 aa, Sitodiplosis mosellana
MPKRKGTPLRGNQRKKKKIVSKTGIEGEIGILAIKMTLKAIVRPQYYQQVKDWFTQKSIECTKICALASLLFLYKVKSANESNNADFFSGDGNKEIKDCFYAVLQKNKEKEEMVPDFRDFVENMEAENRFSWPGNSFFGNQMQYLYKQYTTNLRNNLEMHAERRLYQYLIMRAWQFNAVSTGLTLRNDDIKRAVQWTIDRYDPIKTTDRHWEVKWEKRQLLLDMIAEIGGPEDNDVAIYTTSEGTWFKSINMWLTMQMEVDNFHIWAEENGIEIPKIKNLKVIPIHQFMRQHVKMETDVLIRMMSEMRFRLHGLIIRYEIVEDPMTQFWDEIFDMPKIHRLLKSNKRFRPYIASNGQAVSIMYEVPKSHLDRLVDDEIVRKRYRDGVYVYEIGIDPGMRTWNATVRRNIKTGKEINFTVSSKRYHYLARQGVRDRKAKRWTRRFVAEEQHDRERYQRMPSPKGENWGSYIAHRLTMLKKGIETYTTEKYARLQFDKYIQSNRATDKIANLLTNRKPSIIHMGAVDMPANSPIRIKKHVRCPGNLTNENRVEEEQAHADRQRMREAVEQDPNQAERFVSKVISYQKNWQQSAAIDEDADPAEQEDAAESHDRRILKTCWHRDITAAKLILYKGHCHLFGIQLHFMFTIERIR

SEQ ID NO: 4247 - protein, 728 aa, Sitodiplosis mosellana
MKRKRAQNGRPRSVKLSLNSVLRDQYRANFVAQVNNWCHTATVITVLASLLFLFENNRAFDEDNHGFFSGNGYELIKDCFKNILNENRHKLPLAFRQIIEAAVPNFRWPQREGMGNAFNQLIDQYTTNVKNNIKTYSYTRIKTFFVLQRYELNLLGHNISDIDVKNATKSVMFNNIVPSANVERLLEQARMIGIPVGTKLCDLVRGSWFQTIPIFITIQRLVFNHHERYELLNDLWRRYYRDRLHNAIPSIARPLKIKNFRVIPIHDFKMKHIKIDIHLFYQMACKLGAIKLAKGLFGQPVNISKKVYDSNPFVPWDTIFNMDKIQKVGNRKTFDYTIVTDSVAVSLCFLKPECPSHEYSHEQINEMYENGVFRFVLGMDPGVRTWNATVRKHIASGVEENITIDGPKYHFRAKYGKRKRKSEKWLRLFTELEQHDRNQYPFYPSPKGASNWMSYIEHRVKMLQPGMEVYTARKYIRLNLDKHIEETRASDTIAAFLTRKLPSLIFLGAAQMAPNSPIGIKKRLRCPGVRKLLNSFKKLHNCVVVMVDEFKTSQTCAKCFRPFDRRTRNDRYKVCRQCIPHAANITTDKHLSSVIISKKSNRSYQRERRHVVAEYERLNVHPVYSHGLVPKLNVWFKNWQLNTDNTWNDSRHPHQQNTVWHRDEVAAKCILYKGLCMIKGLDVHPQLSRQHHAAAAAAHNNAEGDQDDNDSDSDDDYVYVLDDVSDEE

SEQ ID NO: 4248 - protein, 486 aa, Sitodiplosis mosellana
MYEYIQKDWFESLWMWIGMQRIVEKFLIDTAHLRQQWKAYDRDPVNNREPSVPKIPKVKNFAAIPLSDTKLKHIPFDHIDLIDIIGQLRNERGWDIRADYRTYYKQGENKDEAWGIVFDMDKIRQLRTGSKEFHHKIQTNSSAVSVLFSRPKRKGAGVTLEQIKAKYEKPVSKGGYMYESGIDPGQKTKMACVRRTLATGSETNIKLSSIQYHWGARQGIRDKRATKMTRKYVRKEQRDLKSCPIASVSPRGSQWKSFIKHKIKMLTDSLATYARRTYAQLSLHKYIESNREMDLMAKHITKNETGVVFLGDAAFPSNSKIGVKRTKRTSDQRMFIVSLKKDGKTDVVLTPEPYTSQTCANCLRRFPRSTKSDRFKVCKDCRPHKDVRLPPVIVTDRSRRRKQRNRKQNASQKPTANVTRAERAGKHREKRRSERESHNPEQLDTEEAVRWYNRRIRRRELRQRRRVAGHRSRKVTKQPEAESDLP

SEQ ID NO: 4249 - protein, 425 aa, Sitodiplosis mosellana
MDKIRQLRTGSKEFHHKIQTNSSAVSVLFSRPKRKGAGVTLEQIKAKYEKPVSKGGYMYESGIDPGQKTKMACVRRTLATGTETNIKLSSIQYHWGARQGIRDKRATKMTRKYVRKEQRDLKSCPIASVSPRGSQWKSFIKHKIKMLTDSLATYARRTYAQLSLHKYIESNREMDLMAKHITKNETGVVFLGDAAFPSNSKTGVKRTKRTPDQRKFINSLKKDGKTDVVLTPEPYTSQTCANCLRRFPRSTKSDRFKVRKDCRPHKDVRLPPVIVTDRSRRRKQRNRKQNASQKPTANVTRAERAGKHREKRRSERESHNPEQLDTEEAVRWYNRRIRRRELRQRRRVAGHRSRKVTKQPQAESDLPVIPKCTFQRRHGKIDTDALYNILCGVKAMKASTQVAQITLASGHISSRTDLVQRFIIY

SEQ ID NO: 4250 - protein, 208 aa, Sitodiplosis mosellana
MKTSSKRYHYDIKHGVRKNKGEKMTRLFTFEEEYDRNRIHSDIKEVPSPRGTKWSFYIQHRLRMLGNGIEAYTARSYARLRLDKLIEWHRAIDLFAGRLVNHKPALIFFGCGTVAPNSPIRIKKHKKHVRCPGNRKIDRSLQETRQLRHKNGRRILHITNCFGRFPPQTKSYRYILCADCRPDQRAMLPTFIVTNVSERALQTKRAIE

SEQ ID NO: 4251 - protein, 2171 aa, Sitodiplosis mosellana
MAPSCSSKEVKQEDKRSEIKNEKSDVVKDAKKDDDPPKFIPFAVRKRADTVAAGSRKQTVQALKKKYQDQRIAKNKAQCKTRSSTAKEAEMSKMQKSKQNEVDGTPNDSPGKGRNKRKLRGNVGNIQPEEEPVIVKAPKTPRDSITRIQLPQKTLPADTTKGQKVGTRTTKSIGSIPAKSEEKEKDKEKAKEKGKEKETEESTRTTRQRSYSLPKPEVKPPKTPEKSANQAESATPKSAKSKNAKKNANDTVEGDFSSDDDLPLVEKKKAKAARQEKPKRNLKRISNRQNQSIESNERDRSGDRKSDLSSSEPKRKVPATNRKSAQNKNTSNTQSHAKSTVSDKSENESQQESKNDAKVVSRKRRNEFTDLSQTDQSENETKTGRPMRKTKEAAAIYMELIGQKLNLSDFDDDLSVDSFPELPNVKKTEQMENELKANLGKEKRELTSTPKRGRPKREDASLVPEEKPETTQKLIENGHKEEKSKTGEKKKLEKSFSDSDDEPLATDLMPSKEESGKIFGIASVTLAQSSGPIDTKCTLGKCGSIHKPSLGPGVPTEAYLGDQMSNKDRRKAKVNMTHEQIEKWLSECSMTADPFVNDSLDDELDLTSSPKPINYLSTPSPLHTLRDGDNFRDESSSSTKFRTQTPKEGKLTQVQQTTPVKGKINLFPKGECTKTSTEKEDKTLANQTKPIVAKKEAQIVLEKASVSKKPTSTNQIKSADADETKNESIKPISVVKVQSSPNKPNVSGIPITPDKKPIYNRRTPVYNTKKTDQGTVKSPPVVNTFGAFSPENEASVYSFDKEEDNMPASIPFRRHSRRGSTHSKNNENDTTIKTTNIAQMAKSNQRDQPAKKQQIFLALGPEDGKTSAPIPVLAKPNAKDNDKDKGKKSLVNESELGKAIMASDNDGKDSDSEGHTFYIPLQCMANTGNASDQLIQGVAVKLGTEGPEGPNQKVIMHAKLVTKSQMSANTAPIPEGMGMANIHEIVKNLIANKEVKTKSTKRTKNEQTIQPSNNTAFPRYDDPAQMVEAPVFKPTEREFQDPIEFINRITPIAARFGLCRIIPPSTFKPECKISDDMRFTAYNQYVHKMLHRWGPSVKEFSAIKKYLATQCITLNQPPLIGGMEVDLPRLYHTVQELGGLKEVIEKKKWARVAEEMCIPKSAQDRVTKLDDIYCKYLLPYDTLSPSERQKLFESVEADWAKSEAKARRNADRSALSESNSNENSDEEQSDEDDDESGDSGSMECIVKGKSMALSAFFRVARNTMALWFRNTEPITSEVEAEFWRHVAGVTVPTLHVGMLFSACCWYRDPHGLPWIEYLHTGGSKIWYSVPNEQSTNFRTAFTSLVPTHCQNKTVWLPCDTAMVPPHMLTDRGVSLCRTEQEPGQFVVVFPRAYTSNICTGYSISESVYFAPMSWLETAKEDFKLFIMARGACGARGGSDERFTTVKLALRTIIQKPYRLILTTVIGEMNIMATLISLLASLYFLYLVNTAVDDFNNDFFNGGDEIIKMCFQGVLRQNYTNDRMFMVPGFRQMVVNILGEWFPWPTNRFFGNTFKYLYEQYATNVKTNLKTHCEKRLRKFFKMRCYELNHMCLCGDLELDELFDGDDIKNAINYTYNRRDSTRGNANAIRKLEILLAELYWIGAPYRPDDPHPFNIREFIELNWFQALRMFINIQRDIHNFHLAFANLRQSWNLFRKYPLYVQQPEMPEPPEITTFTVIPKCTFQRRHVKIDTDALHNILCGIKAMPRTKGTRVLRNGEYQHRWISQTEFKERGGWRLFFNMDEIIKLVKNKKEFGDSIISDGVSASVLFKLPKQSKTVADEDEAETKRKYFAGEFAYALGIDPGMRTFIASVRLDLKTGEETNEKISFKQYHLKSKQDARNIKAERMTRVFTYDEQADLKRIAAEIGQTPSPRNISWRHYIEHRLRMSQDGIAAYSQKNYARLRLDKHIEWRRAIDLIAGKLVHFKTAIINIGAAEISPNCPIRIKKYVRCPGVRKLIAAFKRRGNCVVRLVDEYMTSQHCARCFKRFPIWTKSKRYKKCNDCQPDERVGLPRTIYTNVSKRVLQMQRKIMRTWEEMRDQVDAIAAILTQRNSGRLVSKKQRFFKTWQPNAAENAGTEDAAQSRKLLKSLWHRDISAAKLIMYKGLCTLLDIPIHPALLRRPDDDGVPLNP

SEQ ID NO: 4252 - protein, 774 aa, Sitodiplosis mosellana
MDIGAVLCLLLIISFSSERQSTSKGQASDLANLVKILVKTTAKPGRLTVMACWNSGVENNDFALFGGSGEDKIKLCFEQVLWHNNQPPKPKSTYKPRGEKPRGPRAELPRIDPEFKAIVEGLDDYHRIDWPNNKDFCNGLKHLTNQYTDNVVTNLKTHANKHITQYLKLKVFQWNSDVGDDAEKFLPSDIASVVNLIVKQKDIKVPIRDPNKLERCSVLYDMVNDLNVFPEIDLHDLTTDPKHWFKAMPMYLSMQREIEEYNSEWPHQRRPKRKKRKRKKTKGKWKRKRSQMLDNPDFRPLIRNLVVVPMCDFRRTHFKIDCSSMHQVLSSQKLLPKVEIENKKGTTSTKTIQQKDFNHSRDYWWNQYFYMRKIRRFVRAKKQFDYSINTDGISVSLQYSAKKKTDNKEIDQKSRIIQKIEDGTIKNYSGVDTGVRSWNTTTTHDIETGKETNFVMSSKQFHWQTGQKVRNAKAKRWTKNFVEMERADRENRDLYPVMPSPKGSTWLNYIKHRVKMMKHGICAYSTAKYTRLALDKHIKSSSVVDEWVNKVTDKKPTLFFFGADGEIPPDSPISIKKHVRCPGVRKTLRSIKKRRDCFIQLVDEWGTSQTDARCMNRFQNQNKAARFKKCRCVPDARTLLPTKIVSKLGKTDLSIYRQLQRAMNEEALVGDERLFPKVKCYYKNWRLNLECSVIWHRDVVAAKNILLKGLWTLLGLPIPEAINRYWREAAEAAAAVAAAAAARATAEAAAAAVAIVDNDVEMFENDQQPADHAV

SEQ ID NO: 4253 - protein, 746 aa, Sitodiplosis mosellana
MARGARGSRGGSDDRFTTVKLALRTIIQKPYRLILTTVIGEMSIMATLISLLASLYFLYLVNTAIDDFNNDFFNSDGDEIIKMCFQGVLRQNYTNDRMFMVPGFRQMVIKILGEWFPWPTNRFFGNTFKYLYEQYATNVKTNLKTHCEQRLRKFFKMRCYELNHMFLSGKIQLDELFDGDDIKNAINYTYNRRDSTRGNANAIRKLEILLAELYWIGAPHRPDDPHPFNIREFVELNWFQALRMFINIQRDIHNFHLSFANLRRSWNLFRKHPLYVQEPEFPEPPEITTFTVIPKCTFQRRHVKIDTDSLYNILCGIKAMKREDGLRVNKKGEVLQRYISQTEFKRIGSWRSYFNMDEINKLVKNKKEFGDSIISDGVSASVLFKLPKQSKTVADEDEAETKRKYFANEFAYALGIDPGMRTFIASVRLDLKTGEETNEKISFKQYHLKSKQDARNIKAERMTRVFTYDEQADLKRIAAEIGQTPSPRNISWRHYIEHRLRMSQDGIAAYSQKNYARLRLDKHIEWRRAIDLIAGKLVHFKTAIINIGAAEISPNCPIRIKKYVRCPGVRKLIAAFKRRGNCVVRLVDEYMTSQHCARCFKRFPIWTKSKRYKKCNDCQPDERVGLPRTIYTNVSKRVLQMQRKIMRTWEEMRDQGDAIAAILTQRNSGRLVSKKQRFFKTWQPNAAENAGTEDAAQSRKLLKSLWHRDISAAKLIMYKGLCTLLDIPIHPALLRRPDDDGVPLNP

SEQ ID NO: 4254 - protein, 728 aa, Sitodiplosis mosellana
MKRKRAQNGRPRSVKLSLNSVLRDQYRANFVAQVTDWCHTATVITVLASLLFLFENNRAFDEDNHGFFSGNGYELIKDCFKNILNENRHKLPLAFRQIIEAAVPNFRWPQREGMGNAFNQLIDQYTTNVKNNIKTWCYTRIKTFFVLQRYELNLLGHNISDIDVKNATKSVMFNNIVPSANVERLLEQARMIGIPVGTKLCDLVRGSWFQTIPIFITIQRLVFNHHERYELLNDLWRRYYRDRLHNAMPSIARPPKIKNFRVIPIHDFKMKHIRIDIHLFYQMACKLGAIKLAKGLFGQPVNISKKFYDSNPFVSWDTIFNMDKIQKVGNRKTFDYTIVTDSVAVSLCFLKPECPSHEYSHEQINEMYENGVFRFVLGMDPGVRTWNATVRKHIASGVEENITIDGPKYHFRAKYGKRKRKSEKWLRLFTELEQHDRNQYPFYPLPKGASNWMSYIEHRVKMLQPGMEVYTARKYIRLNLDKHIEETRASDTIAAFLTRKLPSLIFLGAAQMAPNSPIGIKKRLRCPGVRKLLNSFKKLHNCVVVMVDEFKTSQTCAKCFRPFDRRTRNDRYKVCRQCIPHAANITTDKHLSSVIISKKSNRSYQRERRHVVAEYERLNVHPVYSHGLVPKLNVWFKNWQLNTDNTWNDSRHPHQQNTVWHRDEVAAKCILYKGLCMIKGLDVHPQLSRQHHAAAAAAHNNAEGDQDDNDSDSDDDYVYVLDDVSDEE

SEQ ID NO: 4255 - protein, 728 aa, Sitodiplosis mosellana
MKRKRAQNGRPRSVKLSLNSVLRDQYRANFVAQVTNWCHTATVITVLASLLFLFENNRAFDEDNHGFFRGNGYELIKDCYKNILNENRHKLPLAFRQIIEAAVPNFRWPQREGMGNAFNQLIDQYTTNVKNNIKTWCYTRIKTFFVLQRYELNLLGHNISDIDVKNATKSVMFNNIVPSANVERLLEQARMIGIPVGTKLCDLVRGSWFQTIPIFITIQRLVFNHHERYELLNDLWRRYYRDRLHNAMPSIARPPKIINFRVIPIHDFKMKHIRIDIHLFYQMARKLGAIKLAKGLFGQPVNISKKVYDSNPFVSWDTIFNMDKIQKVGNRKTFDYAIVTDSVAVSLCFLKPECPSHEYSHKQINEMYENGVFRFVLGMDPGVRTWNATVRKHIASGVEENITIDGPKYHFRAKYGKRKRKSEKWLRLFTELEQHDRNQYPFYPSPKGASNWMSYIEHRVKMLQPGMEVYTARKYIRLNLDKHIEETRASDTIAAFLTRKLPSLIFLGAAQMAPNSPIGIKKRLRCPGVRKLLNSFKKLHNCVVVMVDEFKTSQTCAKCFRPFDRRTRNDRYKVCRQCIPHAANITTDKHLSSVIISKKSNRSYQRERRHVVAEYERLNVHPVYSHGLVPKLNVWFKNWQLNTDNTWNDSRHPHQQNTVWHRDEVAAKCILYKGLCMIKGLDVHPQLSRQHHAAAAAAHNNAEGDQDDNDSDSDDDYVYVLDDVSDEE

SEQ ID NO: 4256 - protein, 733 aa, Sitodiplosis mosellana
MANRFKPSIPAEGETKDEITTIKCALKTIIRPQYQQALMSKITDLSVENNDFALFGGSGEDKIKLCFEQVLWHNNQPPKPKSTYKPRGEKPRGPRAELPRIDPEFKAIVEGLDDYHRIDWPNNKDFCNGLKHLTNQYTDNVVTNLETHANKHITQYLKLKVFQWNSDVGDDAEKFLPSDIASVVNLIIKQKDIKVPIRDPNKLERCSVLYDMVNDLNVFPEIDLHDLTTDPKHWFKAMPMYLSMQREIEEYNSEWPHQRRPKRKKRKRKKTKGKWKRKRRQMLDNPDFRPLIRNLVVVPMCDFRRTHFKIDCTSMRQVLSSQKLLPKVEIENKKGTTSTTIIPEKDFNRDRDYWWNQYFYMRKIRRFVRAKKQFDFSINTDGISVSLQYSAKKKTVNKEIDQKSHIIRKIKDGTIKNYSGVDSGVRSWNTTTTHDIETGKETNFVMSSKQFHWQTGQKVRNAKAKRWTKNFVEMERADRENRDLYPVMPSPKGSMWLNYIKHRVKMMKHGICAYSTAKYTRLALDKHIKSSSVVDEWVNKVTDKKPTLFFFGADGEIPPDSPISIKKHVRCPGVRKTLRSIKKRRDCFIQLVDEWGTSQTDARCMNRFQNQNKAARFKKCRCVPDARTLLPTKIVSKLGKTDLSIYRQLQRAMNEEALVGDERLFPKDYGHYWDFRYQRRSIGIGAKLLKQPLLLPLLLPLEQPHEAAAAAVAIVDNDVEMFENDQQPADHAV

SEQ ID NO: 4257 - protein, 1004 aa, Sitodiplosis mosellana
MPKRKGTPLRGSQRKKKKIVSKTGIEGEIGILAIKMTLKAIVRPQYYQQVKDWFTQKSIECTKICALASLLFLYKVKSANESNNADFFSGDGNKEIEDCFYAVLQKNKEKEEMVPDFRDFVENMEAENRFSWPGNSFFGNQMQYLYKQYTTNLRNNLEMHAERRLYQYLIMRAWQFNAVSTGLTLRNDDIKRAVQWTIDRYDPIKTTDRHWEVKWEKRQLLHDMIAEIGGPEDNDVAIYTTSEGTWFKSINMWLTMQMEVDNFHIWAEENGIEIPKIKNLKVIPIHQFMRQHVKMETDVLIRMMSEMRFRLHGLIIKYEIVEDPMTQCWDEIFDMPKIHRLLKSNKRFRPYIASNGQAVSIMYEVPKSHLDRLVDDEIVRKRYRDGVYVYEIGIDPGMRTWNATVRRNIKTGKEINFTVSSKRYHYLARQGVRDRKAKRWTRRFVAEEQHDRERYQRMPSPKGENWGSYIAHRLTMLKKGIETYTTEKYARLQFDKYIQSNRATYKIANLLTNRKPSIIHMGAVDMPANSPIRIKKHVRCPGNRKLAKSFRKIPNTVVRQVNENRTSQLCGRCFTPFDIATQRDRMKVCEWCLPDNDDWPPNLQLPTKIVSKKSKRTLIADRQRMREAVEQDPNQAERFVSKVISYQKNWQQSAAIDEDADPAEQEDAAESHDRRILKTCWHRDITAAKLILYKAAEQESCMVNAAPGSPDLCILSFKGAFHGRTIGALATTHSKYIHKIDIPSFDWPIASFPQYKYPLEENVRENKAEDDRCLAEVEDLIVTYNKKGKYVAGMIVEPIQSEGGDNEASPEFFQKLQRIGKKHGVGFLIDEVQTGGGPTGKLWAHEHFNLDSSPDIVTFSKKMQLGGYYHSADFKPTQAYRVFNTWMGDPGKLLLLEAILNVIKRDGLLENVTRVGDKLKKGLIQAQNDYPALLNSARGRGTFLAINCQSSELRDDIINRLKTKGIQAGGCGDKAIRFRPALVFQEKHADIFFDKFNQVLKETK

SEQ ID NO: 4258 - protein, 702 aa, Sitodiplosis mosellana
VENNDFALFGGSGEDKIKLCFEQVLWHNNQPPKPKSTYKPRGEKPRGPRAELPRIDPEFKAIVEGLDDYHRIDWPNNKNFGNGLKHLTNQYTDNVVTNLETHANKHITQYLVLKVFELNSNLEEDGEKFLPSDIENVVKLIIKQKDIKVPSRDPNKLVRCEVLYDIVRDCNVFPEIDLHDLTTDPKHWYKAMPMYLSMQREIEEYHAMWPHQHRSKRKKRKRKKTKGKWKRKRRQMLDNPDFRPLIRNLVVVPVCDFRRTHFRIDCTSMRQVLSSQKLLPKVEIENKKGTTSTIIIPEKDFNRDRDYWWNQYFYMRKIRRFVRAKKQFDFSINTDGISVSLQYSAKKKTANKETDQKSRIIQKIEDGTIKNFSGVDTGVRSWNTTTTHDIETGKETNFVMSSKQFHWQTDQKVRNAKAARWTKNFVEMERADRENRELYPVMPSPKGSMWLNYIKHRVKMMKHGICAYSTAKYTRLALDKHIKSSSVVDEWVNKVTDKKPTLFFFGADGEIPPDSRISIKKHVRCPGVRLTLRSIKKRRDCFIQLVDEWGTSQTDARCMNRFQNQNKAARFKKCRCVPDARTLLPTKIVSKLGKTDLSIYRQLQRAMNEEALVGDESLFPKVKCYYKNWQLNLECSVIWHRDVVAAKNILLKGLWTLLGLPIPEAINRYWREAAEAAAAAVAIVDNDVEMFEYDQQPADHAV

SEQ ID NO: 4259 - protein, 352 aa, Sitodiplosis mosellana
MYEYIQKDWFESLWMWIGIQRIVEKFLIDTAHLREQWKAYDRDPVNSREPSVPKIPKVKNFAAIPLSDTKLKHIPFDHIDLIDIIGQLRNERGWDIRADYRTYYKQGENKDETWGIVFDMDKIRQLRTGSKDSAVSVLFSRPKRKGAGETLEQIKAKYEKPVSKGGYMYESGIDPGQKTKMACVRRTLDTGTETNIKLSSIQYHWGARQGMRDKQATKMTRKYVHKEQRDLKSCPIASVSPRGSQWKSFIKHKIKMLTDSLATYARRKYAQLSLHKYIESNREMDLMAKHITKNETGVVFLGDAAFPSNSKIGVKRTKRTPDQRKFIVSLKKDGKTDVVLTPEPYTSQTCAN

SEQ ID NO: 4260 - protein, 1015 aa, Sitodiplosis mosellana
QKTNNKVDDSNPFLDIATSFLQETFANQQGGRGGGNGIGGNGIAGIAQLIGSLVQQDGSKSNGGGIGAAQILTGLSQLMNANGGDNGGGGSGFDPSIIGNVIEMFTAAGDNSDDDDDQPQAKRRKRSNSGQDGGIGIDTILNIASAFMGNTNNVDSHADKSNEGLMSLLPMAIQAINSFNGPAGEKVHAKHKDHQWVLPPFLERIHVLWDHFSNSELAEALWEKSGVNQIFKGFTGRDGKLDYDKLFNSLHNQAFRRRWLKATTLYLSDWVNYIAEPEVYKRSNLVSMKRKRAQNGRPRSVKLSLNSVLRDQYRANFVAQVNNWCHTATVITVLASLLFLFENNRAFDEDNHGFFSGNGYELIKDCFKNILNENRHKLPLAFRQIIEAAVPNFRWPQREGMGNAFNQLIDQYTTNVKNNIKTYSYTRIKTFFVLQRYELNLLGHNISDIDVKNATKSVMFNNIVPSANVERLLEQARMIGIPVGTKLCDLVRGSWFQTIPIFITIQRLVFNHHERYELLNDLWRRYYRDRLHNAMPSIARPPKIKNFRVIPIHDFKMKHIRIDIHLFYQMACKLGVIKLAKGLFGQPVNISKKVYDSNPFVSWDTIFNMDKIQKVGNRKTFDYTIMTDSVAVSLCFLKPECPSHEYSHEQINEMYENGVFRFVLGMDPGVRTWNATVRKHIASGVEENITIDGLKYHFRAKYGKRKRKSEKWLRLFTKLEQHDRNQYPFYPSPKGASNWMSYIEHRVKMLQPGMEVYTARKYIRLNLDKHIEETRASDTIAAFLTRKLPSLISLGAAQMAPNSPIGIKKRLRCPGVRKLLNSFKKLHNCVVVMVDEFKTSQTCAKCFRPFDRRTRNDRYKVCRQCIPHAANITTDKHLSSVIISKKSNRSYQRERRHVVAEYERLNVHPVYSHGLVPKLNVWFKNWQLNTDNTWNDSRHPHQQNTVWHRDEVAAKCILYKGLCMIKGLDVHPQLSRQHHAVAAAAQNNPEGDQDDNDSDSDDDYVYVLDDVSDEE

SEQ ID NO: 4261 - protein, 727 aa, Sitodiplosis mosellana
MRKRAQNGRPRSVKLSLNSVLRDQYRANFVAQVNNWCHTATVITVLASLLFLFENNRAFDEDNHGFFSGNGYELIKDCFKNILNENRHKLPLAFRQIIEAAVPNFRWPQREGMGNAFNQLIDQYTTNVKNNIKTYSYTRIKTFFVLQRHELNLLGHNISDIDVKNATKSVMFNNIVPSANVERLLEQARMIGIPVGTKLCDLVRGSWFQTIPIFITIQRLVFNHHERYELLNDLWRRYHRDRLHNAMPSIARPPRIKNFRVIPIHDFKMKHIRIDIHLFYQMACKLGAIKLAKGLFGQPVNISKKVYDSNPFVSWDTIFNMDKIQKVGNRKTFDYAIVTDSVAVSLCFLKPECPSHEYSHEQINEMYENGVFRFVLGMDPGVRTWNATVRKHIASGVEENITIDGPKYHFRAKYGKRKRKSEKWLRLFTELEQHDRNQYPFYPSPKGASNWMSYIEHRVKMLQPGMEVYTARKYIRLNLDKHIEKTRASDTIAAFFTRKLPSLIFLGAAQMAPNSPIGIKKRLRCPGVRKLLNSFKKLHNCVVVMIDEYKTSQTCAKCFRPFDRRTKKDRYKVCRQCIPHAANITTDKHLSSVIISKKSNRSYQRERRHVVAEYERLNVHPVYSHGLVPKLNVWFKNWQLNTDNTWNDSRHPHQQNTVWHRDEVAAKCILYKGLCMIKGLDVHPQLSRQHHAAAAAAHNNAEGDQDDNDSDSDDDYVYVLDDVSDEE

SEQ ID NO: 4262 - protein, 901 aa, Sitodiplosis mosellana
MHPLAYELKLIPFLFEGNFTFSGNVRIKVNVTKSCRNITLHAIALKMIEVNVWKIGNTTQTDDNSRTVVEVSDKYAIEPDQFFVIVFPNELEPNTIYEINIKYMGVLNDMLQGFYRSSYVVNNVTRVEMDSYVWDEFEESVPMSTYLLAFVISDFKNITDGKFSVWAREEAIESARYALEVGPKILSFFEEYFVIKYPLPKIDMIALPDFGAGATVITVLASLLFLFENNRAFEEDNHDFFRGNGYELIKDCFKNILNENRHKLPLAFRQIIETAVPNFRWPQREGMQNAFNQLIDQYTTNVKNNIKTYSYTRIKTFFVLQRHELNLLGHNISDIDVKNATKSVMFNNIVPSANVERLLEQARMIGIPVGTKLCDLVRGSWFQTIPIFITIQRLVFNHHERYELLNDLWRRYHRNRLHNAMPSIARPPRIKNFRVIPIHDFKMKHIRIDIHLFYQMACKLGAIKLAKGLFGQPVNISKKVYDSNPFVSWDTIFNMDKIQKVGNRKTFDYAIVTDSVAVSLCFLKPECPSHEYSHEQINEMYKNGVFRFVLGMDPGVRTWNATVRKHIASGVEENITIDGPKYHFRAKYGKRKRKSEKWLRLFTELEQHDRNQYPFYPSPKGASNWMSYIEHRVKMLQPGMEVYTARKYIRLNLDKHIEETRASDTIAAFLTRKLPSLIFLGAAQMAPNSPIGIKKRLRCPGVRKLLNSFKKLHNCVVVMVDEFKTSQTCAKCFRPFDRRTKKDRYKVCRQCIPHAANITTDKHLSSVIISKKSNRSYQRERRHVVAEYERLNVHPVYSHGLVPKLNVWFKNWQLNTDNTWNDSRHPHQQNTVWHRDEVAAKCILYKGLCMIKGLDVHPQLSRQHHAAAAAAQNNAEGDQDDNDSDSDDDYVYVLDDVSDEE

SEQ ID NO: 4263 - protein, 538 aa, Sitodiplosis mosellana
MIGIPVGTKLCDLVRGSWFQTIPIFITIQRLVFNHHERFELLNDLWRRYHRDRLHNAMPSIARPPKIKNFRVIPIHDFKMKHIRIDIHLFYQMARKLGAIKLAKGLFGQPVNISKKVYDSNPFVSWDTIFNMDKIKKVGNRKTFDYAIVTDSVAVSLCFLKPECPSHEYSHEQINEMYENGVFRFVLGMDPGVRTWNATVRKHIASGVEENITIDGPKYHFRAKYGKRKRKSEKWLRLFTELEQHDRNQYPFYPSPKAASNWMSYIEHRVKMLQPGMEIYTTRKYIRLNLDKHIEETRASDTIAAFLTRKLSSLIFLGAAQMAPNSPIGIKKRLRCPGVRKLLNSFKKLHNCVVVMVDEYKTSQTCAKCFQPFDRRTRKDRYKVCRQCIPHAANITTDKHLSSVIISKKSNRLYQRERRHVVAEYERLNVDSVYSHGLVPKLNVWFKNWQLNIDNTWNDSRHPHQQNTVWHRDEVAAKCILYKGLCMIKGLDVHPQLSRQHHAAAAAAQNNAEGDQDDNDSDSDDDYVYVLDDVSDEE

SEQ ID NO: 4264 - protein, 698 aa, Sitodiplosis mosellana
MGRVIRAQRKGAGSVFVAHTKKRKGAAKLRSLDYAERHGYIKGVVKEIVHDPGRGAPLALVHFRDPYRYKTRKEVFIAPEGLYTGQFVYCGKKATLQIGNVMPLSQMPEGTIVCNLEEKTGDRGRLARTSGNYATVIAHNPDTRKTRVKLPSGAKKVVPSNNRAMVGIVAGGGRIDKPILKAGRAYHKYKVKRNCWPKVRGVAMNPVEHPHGGGNHQHIGKASTVKRGTSAGRKVGLIAARRTVIPKCTFQRRHVKIDTDALHNILCGIKAMPRTKGTRVLRNGEYQQRWISQTEFKERGGWRLFFNMDEIIKLVKNKKEFGDSIISDGVSASVLFKLPKQSKTVADEDEAETKRKYFAGEFAYALGIDPGMRTFIASVRLDLKTGEETNEKISFKQYHLKSKQDARNIKAERMTRVFTYDEQADLKRIAAEIGQTPSPRNISWRHYIEHRLRMSQDGIAAYSQKNYARLRLDKHIEWRRAIDLIAGKLVHFKTAIINIGAAEISPNCPIRIKKYVRCPGVRKLIAAFKRRGNCVVRLVDEYMTSQHCARCFKRFPIWTKSKRYKKCNDCQPDERVGLPRTIYTNVSKRVLQMQRKIMRTWEEMRDQGDAIAAILTQRNSGRLVSKKQRFFKTWQPNAAENAGTEDAAQSRKLLKSLWHRDISAAKLIMYKGLCTLLDIPIHPALLRRPDDDGVPLNP

SEQ ID NO: 4265 - protein, 233 aa, Sitodiplosis mosellana
MDEIIKRNLRMHWELIQACEPLLQSVRLDLKTGEETKISFKQYHQKSKQDARNIKAERMTRVFTYDEQADLKRIAAEIGQTPSPRNISWRHYIEHRLRMSQDGIAAYSQKNYARLRLDKHIEWRRAIDLIAGKLVHFKTAIINIGAAEISPNCPIRIKKYVRCPGVRKLIAAFKRRGNCVVRLVDEYMTSQHCARCFKRFPTWTKSKRYKKCNDCQPDERVGLPRTIYTNVSK

SEQ ID NO: 4266 - protein, 1190 aa, Sitodiplosis mosellana
MASTASEPEIAKHAVLVKSEKLPDVTPVVKGYEWNNGIDYDQLLGSYVHSGFQATNLGKAIDEVNKMLDCREIPIRKEDVDFYEEDEFIRRKSNCTIFLGYTSNIVSSGLRETIRFLVEHKMVDCIVTTAGGVEEDLIKCLAPTFIGSFELDGKTLQMQSAEYSPDVVKALDTLIDDPTLDYLDTTCGCNTIEYLLKELNKHNLINSQHVQQFASQRDPVMVLLSKMDLNHQPSSIIQHLKKAEAPLNGILKALDNDYNKMQEPGMLGMLCELLSGNNFELILSVATMEGQLKTFVSRLIRWNEKSRQVGGEVDNTAVNRSALFDVTFLMLTFIVQTYGSHVVLDGNGDTFFEKWVRDFMIEKNRNKSAMNMVHQCEQSKVDEFLTSISSNDGSMAKILNLRWHEICLILPGVLYQLLVAWENDTISAADVIVHLDNIKSRLCTYSVCVASWLCSYMQIVRDDELLKPLNMVQQFVTLNTSDEMNATNNECLNLTSQIIRKMQTDAHQNQKVRSPMLNIVSNQPLEEQFCEVWSTVSSRGWLSVKATQVLDNLLQSCGPYWLVSKMVNEIIFCKFSKMGYQRKKAKKKGKPIAVLGDVIKEDEKEKDFGIRTVKTQLRAILRPEYRDLLTAAITERSMMATKICVLASWLFLFRCERAFEDNDKGFFEQNGEKVIRSCFYGVLKKNIYKKDKMSPEFRKMVQQLDDSHRVVWPNADYFGNGMNDLIDTYVTNVKNNLKTHSKKRLREWLRVKVFESSLVVRYEQTDIDRVISLAIYGNDDIKINGMDDVAKRERRTLLIEMVTKNSGWDIPDNNIGLFTNGKDWFKSIAFWISLQRKIDDFNTCEEYREERRCQREEFQELKRCRRRNHRPCTCQQPVDRGQNGNEYIEKGPPRVKNLAVIPICSFTRTHFTLDIRTLYSLLRQLGIVPLNITEDEFRKQKEYYWGQYFDMRKIYHLVHKYTRLNFDKYVRANSVTDSIAGMLTNHQPTLVHFGAAQMSPSSPIGIKKSLRCPGNRKMIRSYKKCRGCVVNMVDEYYTSQTCAKCFGRFDRRTKRHRFKVCHDCRPKLVEAMLPSMIVCKVNKRKMRQEKLKLVLLEKEAEEGNGNPAVGNDVPHPDQLNPELLANVAIYHKIWHPVRWKLSSHEYTRRHGHRDIAAAKCILIKGHCDLFGYELPETLQRPSNQRAAVNN

SEQ ID NO: 4267 - protein, 261 aa, Sitodiplosis mosellana
MAAYGSKEYAKIDYDAWAQTRRTLVYIARMIVGKGKDVVVIVGDKLPGANSLGFGYSGTQVHGLFKLLDEHPQCTVYYGSEHRTSKCCCHCGQVLLDARMGESRSLAEKEDRRPRDHGKRTEKSRTKVCLMCKPMDLKKMLPMMRSPLPENTIYVLKNKRELQIEREAANQGQSHPKNQKYAHLEKITWKSKHTISKTTGKRFRRRKTKWRMRQIENDDIDVCFSIWKRHQFNGAYALDAVASRSLNRDINASINIRTLCK

SEQ ID NO: 4268 - protein, 728 aa, Sitodiplosis mosellana
MKRKRAQNGRPRSVKLSLNSVLRDQYRANFVAQVTNWCHTATVITVLASLLFLFENNRAFDEDNHDFFRGNGYELIKDCFKNILNENRHKLPLAFRQIIETAVPNFRWPQREGMHNAFNQLIDQYTTNVKNNIKTYSYTRIKTFFVLQRYELNLLGHNISDIDVKNATKAVMFNNIVPSANVERLLEQARMIGIPVGTKLCDLVRGSWFQTIPIFITIQRLVFNHHERYELLNDLWRRYYRDRLHNAIPSIARPPKIKNFRVIPIHDFKMKHIRIDIHLFYQMACKLGAIKLAKGLFGQPVNISKKVYDSNPFVSWDTIFNMDKIQKVGNRKTFDYTIVTDSVAVSLCFLKPECLSHEYSHEHINEMYENGVFRFVLGMDPGVRTWNATVRKHIASGVEENITIDGPKYHFRAKYGKRKRKSEKWLRLFTELEQHDRNQYPFYPSPKGASNWMSYIEHRVKMLQPGMEVYTARKYIRLKLDKHIEETRASDTIAAFLTRKLPSLIFLGAAQMAPNSPIGIKKRLRCPGVRKLLNSFKKLHNCVVVMVDEFKTSQTCAKCFRPFDRRTKKDRYKVCRQCIPHAANITTDKHLSSVIISKKSNRSYQRERRHVVAEYERLNVHPVYSHGLVPKLNVWFKNWQLNTDNTWNDSRHPHQQNTVWHRDEVAAKCILYKGLCMIKGLDVHPQLSRQHHAAAAAAHNNAEGDQDDNDSDSDDDYVYVLDDVSDEE

SEQ ID NO: 4269 - protein, 231 aa, Sitodiplosis mosellana
MIVGKGKDVVVIVGDKLPGANSLGFGYSGTQVHGLFKLLDEHPQCTVYYGSEHRTSKCCCRCGQVLLDARMGESRSLAEKEDRPRDHGKRTEKSRTKVCLMCKPMDLKGMLPMMRSPLPENTIYVLKNKRELQIEREAANQGQSHPKNQKYAHLEKITWKSKHTISKTTGKRVRRRKTKWRMRQIENDDIDVCFSIWKRHQFNGAYALDAVASRRFNRDINASINIRTLCK

SEQ ID NO: 4270 - protein, 670 aa, Sitodiplosis mosellana
MAQQSATKTEVKAIVEGLDDYHRIDWPNNKDFCNGLKHLTNQYTDNVVTNLETHANKHITQYLKLKVFQWNSDVGDDAEKFLPSDIASVVNLIIKQKDIKVPIRDPNKLERCSVLYDMVNDLNVFPEIDLHDLTTDPKHWFKAMPMYLSVQREIEEYNSEWPHQRRPKRKKRKRKKTKGKWKRKRSQMLDNPDFQPLIRNLVVVPMCDFRRTHFKIDCSSMHQVLSSQKLLPKVEIENKKGTTSTKTIQQKDFNHSRDYWWNQYFYMRKIRRFVRAKKQFDYSINTDGISVSLQYSAKKKTDNKEIDQKSRIIQKIEDGTIKNYSGVDSGVRSWNTTTTHDIETGKETNFVMSSKQFHWQTGQKVRNAKAKRWTKNFVEMERADRENRDLYPVMPSPKGSMWLNYIKHRVKMMKHGICAYSTAKYTRLALDKHIKSSSVVDEWVNKVTDKKPTLFFFGADGEIPPDSPISIKKHVRCPGVRKTLRSIKKRRDCFIQLVDEWGTSQTDARCMNRFQNQNKAARFKKCRCVPDARTLLPTKIVSKLGKTDLSIYRQLQRAMNEEALVGDERLFPKVKCYYKNWRLNLECSVIWHRDVVAAKNILLKGLWTLLGLPIPEAINRYWREAAEAAAAVAAAAAARATAEAAAAAVAIVDNDVEMFENDQQPADHAV

SEQ ID NO: 4271 - protein, 717 aa, Sitodiplosis mosellana
MARRARGSRGGSDERFTTVKLTLRTIIQKPYRLILTTVIGEMSIMATLISLLALLYFLYLVNTAVDDFDNDFFNSNGDEIIKMCFQGVLRQNYTNDRMFMVPGFRQIVIKILGEWFPWPTNRFFGNTFKYLYEEYATNVKTNLKTHCEKRLRKFFKMRCYELNHMCLCGDLELDELFDDDDIKNAINYTYNRRDSTRGNANAIRKLEILLAELYWIGAPHRPDDPHPFNIRKFVELNWFQALRMFMNIQRDIHNFHLSFANLRQSWNLFRKYPLYVQQPEFPEPPEITTFTVIPKCTFQRRHVKIDMDALHNILCGIKAMPRTKGTRVLRNGEYQQRWISQTEFKERGGWRLFFNMDEIINKTVADEDEAETKRKYFAGEFAYALGIDPGMRTFIASVRLDLKTGEETNEKISFKQYHLKSKQDARNIKAERMTRVFTYDEQADLKRIAAEIGQTPSPRNISWRHYIEHRLRMSQDGIAAYSQKNYARLRLDKHIEWRRAIDLIAGKLVHFKTAIINIGAAEISPNCPIRIKKYVRCPGVRKLIAAFKRRGNCVVRLVDEYMTSQHCARCFKRFPIWTKSKRYKKCNDCHPDERVGLPRTIYTNVSKRVLQMQRKIMRTWEEMRDQGDAIAAILTQRNSGRLMSKKQRFFKTWQPNAAENAGTEDAAQSRKLLKSLWHRDISAAKLIMYKGLCTLLDIPIHPALLRRPDDDGVPLNP

SEQ ID NO: 4272 - protein, 216 aa, Sitodiplosis mosellana
MLTNSKRCIINIGASQPPANSPIQIKKHVRCPGVRKLVKSFKKMEGNVIRFVNEARSSRLCARCFEPFPLSTLNDRVMIVVAKSKRKLRSDRKEMRQAAVLNPNQPRGFVSKVIGYRKNWQQNAANGMDDNVEERRGVIIHDAELSIIEYTDEFVPEDPVDDSPVLKTVWQRDISAAKLILFRGHCELFGHRLHDAFTRQHLVYPTWIRHANINIR

SEQ ID NO: 4273 - protein, 557 aa, Sitodiplosis mosellana
MKRYDATRGDADRLAKRDRLLLYVRDIRGPADDDIAKFTKDEDTWFASLPIWLMMQSEIETHLNWVEQHHDNIVQVIALPNIKNLVVIPICHHTRKAVRIYADVLYRMMCETGTIPRDEYGWQHSGSDVTLKSNQAYYFKMIFNMEKINRVLKANKKFEHILSDGVSASILYSVKITVVNKLVEDGLVRKRYSDGFYVYELGIDWGMKTWNATARRRINNDKERIHNGKEMNFTINSKKYHYGTGERVRKEKKERWTRAFGQFEESDRNNRARYDRMPSPKGSNWHDYIRHRLTIMKKAIAVLYTTKKYTRLSFDHYIESNRISDKVAATLTNRKRCIINIGASQPPANSPIKIKKHVRCPGVRKLVKSFKKMEGNVIRFVNEARSSRLCARCFEPFPLSTLNEWCMPDQEDWPDGMKLPEKIVAAKSKRKLRSDRREMRQAAVQNPNQPRGFVSKVICYRKNWQQNAANGMDDNVEERRGVINHGGGIIEYTDEYEPEDPVDDFSLLKTVWQRDISAAKLILYRGHCELFGHRLHDAFTRQHLLYLTRFRVNFNIH

SEQ ID NO: 4274 - protein, 940 aa, Sitodiplosis mosellana
MGYQRKKTRKKGKPIAVLGDVIKEDETEKDSGIRTIKTQLRAILRPEYRDLLIAAITDRSMMATKICALASQLFLSRCERAFDDNDKGFFEQNGEKVIRSSTIAIERRNLLIEMVTKNSWWDIPDNNIGLFTNGKDWFKSIAFWISLQRKIDDFNTCEEYREERRCQREEFQELKRCRRRNHRPCTCQQPVDRGQNGNEYIEKGPPRVKNLAVILICSFTRTHFTLDIRTLYFLLRQLEIVPLNITEDEFRKQKEYYWDQYFDMLKIYHLGRSRKEFRFRILSNGQAVSLQFNIDKTKMSNMEPDKKAIVQNYKKFVNEGATDPGVNTWNATTVHNIETGKEANYTISSKQYHYWTKQTVRNRQGKRWTKDFVKEERQDRENRAIYPVMPSPLGRHWKDYIRHRLKMTERGIAVYTTDKYTELNFDKYVRANSVTDSIAGMLTNHEPTLMHFGAAQMSPSSSIGIKKTLRCPGNRKMIRSYKKCRGCVVNMVDEYYTSQTCAKCFGRFDRRTKRHRFKVCHDCRPQLVEAMLPSMIVCKVNKRKMRQEKLKLFLLEKEAEEGNGNPAVGNDVPHPDQLNPELLPKVAIYHKIWHVNESSGILEYVKFNSAGKMEVVEPRVHKTTWHRDIAAAKCILIKDDQPSTRMRTARSHENIAAVSESVEDEPRTSVRRRSQQVGLSRMTTWRILTKDLGLHAYKIVLTQELEPMDHGKRRDFVEWVKGKEAADADFLKKVIFSDEAHFHLNGYVNRQNCRFLGSENPRETEEVSAHPARCTVWCGLWAGGIIGPYFFENDDGRAVSINGERYREMLQYFFWSEIEDMDLSDMWFQQDGDRPHTTPETLAVIEERFPNRIISQKAEVEWPPRSCDLTPLDYFLWGYVKDKVYANKPSTIAELKIEIRRVITTVNVPLLESVIENLGKRLKVCEKSRGGHLHDILFHT

SEQ ID NO: 4275 - protein, 799 aa, Sitodiplosis mosellana
MDKRFLYNLMQICSGYGEVYTHMHGATFNIVQYAREHSDEVLAMIDNDTDFLLFEGEYQYWSLADLDILRFQTKKYCSDMGYQRKKTRKKGKPIAVLGDLIKEDEKEKDSDIRTIKTQLRAILRPEYRDLLIAAITDRSMMATKICALASQLFLFRCERAFDDNDKGFFEQNDEKVIRSCFFGVLKKNIYKKKKMPPEFRKMVQQLDDSHRVVWPNADYFGNGMNDLIDPYVTNVKNNLKMHSKKRLREWLRVKVFESSLVARYEQADIDRVICLAIYGNDDIKINGMDDVAKRERRDLLIEMVTKNSWWDIPDNNIGLFTNGKDWFKSIAFWISLQRKIDDFNTCEEYREERRCQREEFQELKRCRRRNHRPCTCQQPVDRGQNGNEYIEKGPPRVKNLAVIPICSFTRTHFTLDIRTLYFLLRQLEIVSLNITEDEFRKQKEYYWDQYFDMLKIYHLGRHRKEFRFRILSNGQAVSLQFNIDKTKMSNMEPDKKAIVQNYKKFVNEGATDPGVNTWNATMVHNIETGKETNYTISSKQYHYWTKQTVRNRQGKRWTKDFVKEERQDRENCALYPVMPSPLGRHWKDYTRHRLKMTERGIAVYTTDKYTRLNFDKYVRANSVTDSIAGMLTNHQPTLMHFGAAQMSPSSPIGIKKTLRCPGNRKMIRSYKKCRGCVVNMVDEYYTSQTCAKCFGHFDRRTKRHRFKVCHDCRPAGVMLPSMIVCKVNKRKMRQEKLKLFLLEKEAEEGNGNPAVGNDVPHPDQLNPELLPKVAIYHKIWHVNESSKIMEYVKFPEVPM

SEQ ID NO: 4276 - protein, 690 aa, Sitodiplosis mosellana
MISHCLVEVEKIRSNSALNKCYGTTISHQNRSQRINQEETKPRGPRAELPRIDPEFKAIVEGLDDYHRIDWPNNKDFCNGLKHLTNQYTDNCHVGDDAEKFLPSDIASVVNLIVKQKDIKVPIRDPNKLERCSVLYDMVNDLNVFPEIDLHDLTTDPKHWFKAMPMYLSMQREIEEYNSEWPHQRRPKRKKRKRKKTKGKWKRKRSQMLDNPDFRPLIRNLVVVPMCDFRRTHFKIDCSSMHQVLSSQKLLPKVEIENKKGTTSTKTIQQKDFNHSRDYWWNQYFYMRKIRRFVRAKKQFDYSINTDGISVSLQYSAKKKTDNKEIDQKSRIIQKIEDGTIKNYSGVDTGVRSWNTTTTHDIETGKETNFVMSSKQFHWQTGQKVRNAKAKRWTKNFVEMERADRENRDLYPVMPSPKGSMWLNYIKHRVKMMKHGICAYSTAKYTRLALDKHIKSSSVVDEWVNKVTDKKPTLFFFGADGEIPPDSPISIKKHVRCPGVRKTLRSIKKRRDCFIQLVDEWGTSQTDARCMNRFQNQNKAARFKKCRCVPDARTLLPTKIVSKLGKTDLSIYRQLQRAMNEEALVGDERLFPKVKCYYKNWRLNLECSVIWHRDVVAAKNILLKGLWTLLGLPIPEAINRYWREAAEAAAAVAAAAAARATAEAAAAAVAIVDNDVEMFEYDQQPADHAV

SEQ ID NO: 4277 - protein, 1107 aa, Sitodiplosis mosellana
MLNDKRKILVSTGNILNVNKKAGQKTNEELFDCLNLTMSDPVVDAKAGIIARSNDDLLAKVKEYERNDIKIGAKVFLNHSDPNLLHEAIDSLLQVLKIDHLDNLILGFHPLDGAKSKTNGTDKTNGYQNGSLGSSLPKESLLTWGDTATAIDELKELWQVLETYADDKRICQLGIADLDTDTLIELYTSCRVKPTISQINLSACCVVPPSMQEFCAKNEIQLLTHSDSEDDHRHCTDANELIIVSDDDEENVENVDVNNVIQTLRDRLKKYLYYPNKQKCNDLSELNAHPQAATIIELNGTPDMHRNCERCGQLIRKHSNRMHSRQRTLCRTYGLSAKKKTRKKGKPIAVLGDVIKEDEKEKDSGIRTVKTQLRAILRPEYRDLLIAAITDKSIMATKICALASQLFLCRCERAFDDNDKAFFEKNGEKVIRSCFYGVLKKNIYKKDKMSPEFRKMVHELDDSHRVVWPNADYFGNGMNDLIDTYVTNVKNNLKTHSKKRLREWLRVKVFESSLVARYEQADIDRVISLAIFGNDDIKINGMDDVAKRERRNLLIEMVTKNSWWDIPDNNIGLFTNGKNWFKSIAFWISLQRKIDDFNTCEEYREERRCQREEFQELKRCRRRNHRPCTCQQPTDRGQNGNEYVEKGPPRVKNLAVIPICSFTRTHYTLDTRTLYFLLRQLEIVPLNITQDEFRKQKEYSWGQCFDMLKIYHLGRSRKEFRFRILSNGQAVSLQFDIDKTKMSNMESDKKAIVQNYKTFVNEGGTDPGVNTWNATTVHNIETGKETNYTISSKQYHYWTKQTVRNRQGKRWTKDFVKEERQDRENRALYPVMPSSLGRHWQDYIRHRLKMTERGIAVYTTDKYTRLNFDKYVRANSVTDSIAGMLTNHQPTLMHFGAAQMSPSSPIGIKKTLRCPGNRKMIRSYKKCRGCVVNMVDEYYTSQTCAKCFGRFDRRTKRHRFKVCHDCRPQLVEAMLPSMIVCKVNKRKMRQEKLKLFLLEKEAEEGNGNPAVGNDVPHPDQLNPELLPKVAIYHKIWHVNESSGILEYVKFNSAGEMEVVEPRVHKTKWHRDIAAAKCILIKGHCDLFGDELPETLQRPSNQRAAVNN

SEQ ID NO: 4278 - protein, 475 aa, Sitodiplosis mosellana
MVAVAIVAIAITSAFDGSAGDAFIIAVAAILIVDIIALTLSSPFSNNNNNNINNSFTFGSTLIQATDEETRNRLAEWFQGNGESFKPSIPAKGETKDEITAIKCALKTIIRPQFQQALMTKITDLSLQATSICVLGSLLFLFEVLWHNNKPPKPKSKYKPTGKKPRGPRAELPRIDPEFKAIVEGLDDYHRIDWPNNEHFSNGLKHLTNQYADNVVTNLKTHANKHITQYLKLKVFQWNSGLGDDAKKFLPSDIASAVNLIIKQKDIKVPIRDPDKLERCSVLYDMVNDLNTNFVMSSKQFHWQTGQKVRNVKEKRWTKKFVEMERADRENRELYPVMPSPKGSHWLNYIKHRVKMMKHGICAYSTAKYTRLALDKHIKSSSVVDKWVNKVTDKQPTVFLFGADGEIPPDSPISIKKHVRCPGVRLWTLLGLPIPEAINSYWREDREAVEAAAAVAAAVAAAAVAIVDNDVEMFE

SEQ ID NO: 4279 - protein, 229 aa, Sitodiplosis mosellana
MKFDCSILTDSVSVSLMYIKSNRTLDAKDLKTIEDMKTSRLLVLSFDKYVESTRASDKIAASLTNKKPSMINLGAVQMAPNSPIRIKRRLRCPGTRKLLASFAKLNNCTHIVRFVDEYFTSQTCAKCFGRFDSRTKRNRFKVCRQCWLNGYDGQILPNKIVTTLSNRELKKERREKEQERMQQNVNKNQPRRCEVFGYRIHPNLSRPVQHNEQNIDSDYEHISEDEDDE

SEQ ID NO: 4280 - protein, 246 aa, Sitodiplosis mosellana
MRTFIASVRLDLKTGEETNEKISFKQYHQKSKQDARNIKAERMTRVFTYDEQADLKRIAAEIGQTPSPRNISWRHYIEHRLRMSQDGIAAYSQKNYARLRLDKHIEWRRAIDLIAGKLVHFKTAIINIRAAKISPNCPIRIKKYVRCPGVRKLSAAFKRRGNCVVRLVDEYMTSQHCARCFKRFPIWTKSKRYKKCNDCQPDERVGLPRTIYTNVSKRVLQMQRKIVRTWEEMRDQGDAIAAILTK

SEQ ID NO: 4281 - protein, 480 aa, Sitodiplosis mosellana
MRVSYRRKMANRFKASIPAKGETKDEKITTIKCALKTIIRPQYQQALMSKITEPSVENNNFALFGGSGEDKIKLCFEQVLWHNNQPPKPKSKYKPRGEKPRGPRAELPRIDPEFKTIVECLDDYHRIDWANNKDFCNGLKHLTNQYNDNVVTNSKTHANKHITQYLYSAKKKTANKETDQKSRIIQKIEDGTIKNFSGVDTGVRSWNTTTTHDIETGKETNFVMSSKQFHWQTGQKVRNAKAKRWTKNFVEMERADRENRDLYPVMPSPKGSMWLNYIKHRVKMMKHGICAYSTAKYTRLALDKHIKSSSVVDEWVNKVTDKKPTLFFFGADGEIPPDSRISIKKHVRCPGVRLTLRSIKKRRNCFIQLVDEWGTSQTDARCMNRFENQRKDARFKRCRCVPDARTLLPTKIVSKLSKTDLSIYRQLQRAMNEEASEEDECLFPKVKCYYKNWRLNLECSVIWHRDVVAAKNILLKGKAN

SEQ ID NO: 4282 - protein, 476 aa, Sitodiplosis mosellana
MRVSYRRKMANRFKASIPAKGETKDEKITTIKCALKTIIRPQYQQALMSKITEPSVENNNFALFGGSGEDKIKLCFEQVLWHNNQPPKPKSKYKPRGEKPRGPRAELPRIDPEFKTIVECLDDYHRIDWANNKDFCNGLKHLTNQYNDNVVTNSKTHANKHITQYLYSAKKKTANKETDQKSRIIQKIEDGTIKNFSGVDTGVRSWNTTTTHDIETGKETNFVMSSKQFHWQTGQKVRNAKAKRWTKNFVEMERADRENRDLYPVMPSPKGSMWLNYIKHRVKMMKHGICAYSTAKYTRLALDKHIKSSSVVDEWVNKVTDKKPTLFFFGADGEIPPDSRISIKKHVRCPGVRLTLRSIKKRRNCFIQLVDEWGTSQTDARCMNRFENQRKDARFKRCRCVPDARTLLPTKIVSKLSKTDLSIYRQLQRAMNEEASEEDECLFPKVKCYYKNWRLNLECSVIWHRDVVAAKNILLK

SEQ ID NO: 4283 - protein, 584 aa, Sitodiplosis mosellana
MRAFLRMRCFEFNHGRLRYRKPANVGIFDETDVKNTTKFLVNQRDWTHGNADRYRKMQFLLSEVVRIGGPADNNLKEFVTKKWFASLHMWIKIQRNISYFHTTYGILNSDWVKYKSDRVTNKMPLVPRPPKVKNFIAIPVHDFDLKHIRIDVKHFYEIARGLGALKHAIGKSGRKVCIRVFSASFNRKMWWKHVFNMKKINKIGGRKMKFDCSIMTDSVSVSLMYIKSNRTLDAKDLKTIEDMYREGRFVYELGIDPGVRTWNATVRRTVATGDEENITIAGPTYHWRAKRSKLVPSPKSKDAWKSYICHRLTMMALGIAVFGTRKYARLSFDKYVESTRASDKIAASLTNKKPSMIYLGAAQMAPNSPIGIKRRLRCPGTRKLLASFKKLNNCTVRFVDEYFTSQTCAKCFGRFDPRTKRNRFKVCRQCWLNGYDGQILPNKIVTTLSNRELKKECREKKQERMQQNVNNNQPRNAANPTRPAKTRLVSKLCKYYKCHTNEAGDLEWYDWHVNQEVTNWHRDVVAAKCILYKDGFDYVDVESLIDCVICFSSYCDVEDVDIVMNDPKSMNCYYSMIWKKMIET

SEQ ID NO: 4284 - protein, 714 aa, Sitodiplosis mosellana
MPKRKGTPLRGNQRKKKKIVSKTGIEGEIGILAIKMTLKAIVRPQYYQQVKDWFTQKSIECTKICALASLLFLYKVKSANESNNADFFSGDGNKEIKDCFYAVLQKNKEKEEMVPDFRDFVENMEAENRFSWPGNSFFGNQMQYLYKQYTTNLRNNLEMHAERRLYQYLIMRAWQFNAVSTGLTLRNDDIKRAVQWTIDRYDPIKTTDRHWEVKWEKRQLLLDMIAEIGGPEDNDVAIYTTSEGTWFKSINMWLTMQMEVDNFHIWAEENGIEIPKIKNLKVIPIHQFMRQHVKMETDVLIRMMSEMRFRLHGLIIRYEIVEDPMTQCWDEIFDMPKIHRLLKSNKRFRPYIASNGQAVSIMYEVPKSHLDRLVDDEIVRKRYRDGVYVYEIGIDPGMRTWNATVRRNIKTGKEINFTVSSKRYHYLARQGVRDRKAKRWTRRFVAEEQHDRERYQRMPSPKGENWGSYIAHRLTMLKKGIETYTTEKYAHLQFDKYIQSNRATDKIANLLTNRKPSIIHMGAVDMPTNSPIRIKKHVRCPGNRKLAKSFRKIPNTVVRQVNENRTSQLCGRCFTPFDIATQRDRMKVCEWCLPDNDDWPPNLQLPTKIVSKKSKRTLIADRQRMREAVEQDPNQAERFVSKVISYQKNWQQSAAIDEDADPAEQEDAAESHDRRILKTCWHRDITAAKLILYKGHCHLFGIQLHFMFTIERIR

SEQ ID NO: 4285 - protein, 821 aa, Sitodiplosis mosellana
MGFVLSVAVSFPLVVFPCRASLYSLLYHRSHSEIAHYIPEHRFKYITISMVLVALIIGILIPSIELIIGLVGSTIGVAICIMFPASCFIKINKKNSTERLAAQLFIMARGACGARGGSDERFTTVKLALRTIIQKPYRLILTTVIGEMSIMATLISLLVSLYFLYLVNTAVDEFNNDFFNSNGDEIIKMCFQGVLRQNYTNDRMFMAPGFRQIVIKILGEWFPWPTNRFFGNTFKYLYEQYATNVKTNLKTHCEKRLRKFFKMRCYELNHMFLSGKIQLDELFDGDDIKNAINYTYNRRDSTRGNANAIRKLEILLAELYWIGAPYRPDDPHPFNIIEFVELNWFQALRMFINIQRDIHNFHLAFANLRQSWNLFRKYPLYVQQPEFPEPPEITTFTVIPKCTFQRWHVKIDTDSLYNILKGINAMPRTKGTRVLRNGEYQQHWISQTEFKERGGWRLFFNMDEIIKLVKNKKEFGDSIISDGEFAYALGIDPGMRTFIASVRLDLKTGEETNEKISFKQYHLKSKQDARNIKAERMTRVFTYDEQADLKRIAAEIGQTPSPRNISWRHYIEHRLRMSQDGIAAYSQKNYARLRLDKHIEWRRAIELIAGKLVHFKTAIINIGAAEISPNCPIRIKKYVRCPGVRKLIAAFKRRGNCVVRLVDEYMTSQHCARCFKRFPIWTKSKRYKKCNDCQPDERVGLPRTIYTNVSKRVLQMQRKIMRTWEEMRDQGDAIAAILTQRNSGRLVSKKQRFFKTWQPNAAENAGTEDAAQSRKLLKSIWHRDISAAKLIMYKGLCTLLDIPIHPALLRRPDDDGVPLNP

SEQ ID NO: 4286 - protein, 655 aa, Sitodiplosis mosellana
MAQQSATKTEVKAIVEGLDDYHRIDWPNNKDFCNGLKHLTNQYTDNVVTNLETHANKHITQYLKLKVFQWNSDVGDDAEKFLPSDIASVVNLIIKQKDIKVPIRDPNKLERCSVLYDMVNDLNVFPEIDLHDLTTDPKHWFKAMPMYLSVQREIEEYNSEWPHQRRPKRKKRKRKKTKGKWKRKRSQMLDNPDFQPLIRNLVVVPMCDFRRTHFKIDCSSMHQVLSSQKLLPKVEIENKKGTTSTKTIQQKDFNHSRDYWWNQYFYMRKIRRFVRAKKQFDYSINTDGISVSLQYSAKKKTDNKEIDQKSRIIQKIEDGTIKNYSGVDSGVRSWNTTTTHDIETGKETNFVMSSKQFHWQTGQKVRNAKAKRWTKNFVEMERADRENRDLYPVMPSPKGSMWLNYIKHRVKMMKHGICAYSTAKYTRLALDKHIKSSSVVDEWVNKVTDKKPTLFFFGADGEIPPDSPISIKKHVRCPGVRKTLRSIKKRRDCFIQLVDEWGTSQTDARCMNRFQNQNKAARFKKCRCVPDARTLLPTKIVSKLGKTDLSIYRQLQRAMNEEALVGDERLFPKVKCYYKNWRLNLECSVIWHRDVVAAKNILLKGLWTLLGLPIQRRSIGIGAKLLKQPLLLPLLLPLEQPLKQPLLLSPSWIMM

SEQ ID NO: 4287 - protein, 749 aa, Sitodiplosis mosellana
MHLASMLMLYTINEAFDDGNLDFFVNQNGVNLITGCFNCVTSDNINDPLTAQMPDAFLAMVTQGSPNFEWPRRHQMTRQVYALKDQYVANVKTNLETHCWVRLTHFLRVKCHEFNHKGSPLDVIYNASYLPFDDIDIRNTMKNLMYNEDWTYDDDESRKSKMEILFKEVSQLCGPSFVKYFTMYEYIQKDWFESLWMWMGMQRIVEKFSIDTAHLREQWKAYDRDPVKNREPSVPKIPKVKNFAAIPLSDTKLKHTPFDHKDLIDIVGQLKNERGWDIRADYRTYYKQGENKDEAWGIVFDMDKIRRLRTGSKEFYHKIQTNSSAVSVLFSRPKRKGAGVTLEQIKAKYEKPVSKGGYMYESGIDPDQKTKMACVRRTLATGTETNIKLSSIQYHWGARQGMRDKQAKKMTSKYVHKEQRDLKSYPIASVSPRGSQWKSFIKHKIKMLTDSLATYARRKYAQLSLHKYIESNREMDLMAKHITKNETGVVFLGDAAFPSNSKIGVKRTKRTPDQRKFIVSLKKNGKTDVVLTPEPYTSQTCANCLRRFPRSTKSDRFKVCKDCRPHKDVGLPPVIVTDRSRRRKQRDRKQNASQKPTANVTRAERAEKHREKRRSERESHNPEQLDTEQAVRRYNRRIRRRELRQRRRVAGHRSRKVTKQPEAESDLPGFDKIGDTSICKIRVKNRKAKPQLWQRIHYDATDKGIGDLGSKKILFQKNWHSSPMNDQNAFTVTWHRDICAAKCILCRGM

SEQ ID NO: 4288 - protein, 714 aa, Sitodiplosis mosellana
MPKRKGTHLRGNQRKKKKIVSKTGIEGEIGILAIKMTLKAIVRPQYYQQVKDWFTQKSIECTKICALASLLFLYKVKSANESNNADFFSGDGNKEIKDCFYAVLQKNKEKEEMVPDFRDFVENMEAENRFSWPGNSFFGNQMQYLYKQYTTNLRNNLEMHAERRLYQYLIMRAWQFNAVSTGLTLRNDDIKRAVQWTIDRYDPIKTTDRHWEVKWEKRQLLLDMIAEIGGPEDNDVAIYTTSEGTWFKSINMWLTMQMEVDNFHIWAEENGIEIPKIKNLKVIPIHQFMRQHVKMETDVLIRMMSEMRFRLHGLIIRYEIVEDPMTQCWDEIFDMPKIHRLLKSNKRFRPYIASNGQAVSIMYEVPKSHLDRLVDDEIVRKRYRDGVYVYEIGIDPGMRTWNATVRRNIKTGKEINFTVSSKRYHYLARQGVRDRKAKRWTRRFVAEEQHDRERYQRMPSPKGENWGSYIAHRLTMLKKGIETYTTEKYARLQFDKYIQSNRATDKIANLLTNRKPSIIHMGAVDMPATSPIRIKKHVRCPGNRKLAKSFRKIPNTVVRQVNENRTSQLCGRCFTPFDIATQRDRMKVCEWCLPDNDDWPPNLQLPTKIVSKKSKRTLIADRQRMREAVEQDPNQAERFVSKVISYQKNWQQSAAIDEDADPAEQEDAAESHDRRILKTCWHRDITAAKLILYKGHCHLFGIQLHFMFTIERIR

SEQ ID NO: 4289 - protein, 1238 aa, Sitodiplosis mosellana
MTVVSKYLDEAIVRYEKMGFSKHALSKGIVTIAVGAYVAHISYPYLSKMIKAANLAPVLSETASTTDDDTSDSDFDSESDDYESAIESNNINSNRIDRKNIDATLPDGTTKLDGDDNLDNDETAQGVETDTGDRLTVPTGKRKRKHSKVIKQQIKQAEKFLAQATQERKKSEQVGNLSFSQLEERRIGHLTKPCFDLMLIGLALMRSSRKMKANIVTGPALAFVVISATALILRQLSPKFGQLVAEEATRYGYLRHVHARVITNAEEIAFYGGQRVELMQLREAFRRLANQMNIIYTQRLWFVMLEQFFMKYVWSGTGMIMISLPVLMGNQNQPHNSALSTATTVSDDGISDRTQYLTTARNLLISGADAIERLMSSYKEIVALAGYTYRVAGMLEVFDDTAHGRYNKVMMAEGRNNAGIIEFRNGQPVTKGRIIVNTDPNDRSISLNNVPVVTPNCDIVVPSLTLRIEPGMHLLITGPNGCGKSSLFRIVNGLWPIYGGELYIPKPIVGKPSMFYIPQRPYLTIGNLRDQIIYPDTVDDMLSKKYDEDMLHDIMKTVSLEHIVARPQYALLDECTSAVSIDVESSIYEAAKMAGITLLTITHRPTLCRTMANRFKPSIPAEGETKDEITTIKCALKTIIRPQYQQALMSKITDLSVENNDFALFGGSGEDKIKLCFEQVLWHNNQPPKPKSTYKPRGEKPRGPRAELPRIDPEFKAIVEGLDDYHRIDWPNNKDFCNGLKHLTNQYTDNVVTNLETHANKHITQYLVLKVFELNSNLEEDGEKFLPSDIASVVNLIIKQKDIKVPIRDPDKLVRCEVLYDIVRDCNVFPEIDLHDLTTDPKHWYKAMPMYISMQREIEEYHYSAKKKTDNKEIDQKSRIIQKIEDGTIKNYSGVDTGVRSWNTTTTHDIETGKETNFVMSSKQFHWQTGQKVRNAKAKRWTKNFVEMERADRENRDLYPVMPSPKGSMWLNYIKHRVKMMKHGICAYSTAKYTRLALDKHIKSSSVVDEWVNKVTDKKPTLFFFGADGEIPPDSPISIKKHVRCPGVRKTLRSIKKRRDCFIQLVDEWGTSQTDARCMNRFQNQNKAARFKKCRCVPDARTLLPTKIVSKLGKTDLSIYRQLQRAMNEEALVGDERLFPKVKCYYKNWRLNLECSVIWHRDVVAAKNILLKGLWTLLGLPIPEAINRYWREAAEAAAAVAAAAAARATAEAAAAAVAIVDNDVEMFENDQQPADHAV

SEQ ID NO: 4290 - protein, 416 aa, Sitodiplosis mosellana
MSQTSRPTSKLSFELDELFDGDDIKNAINYTYNRRDSTRGNTHAIQKLEILLAELYWIGAPYRSDDPHPFNIKEFVELNWFQALRMFVNIQCDIHNFHLAFANLRQSWNLFRKYPLYVQEPEFPEPPEITTFTVILKCTFQRRHVKIDTDSLYNILCGIKAMKREDGLRVNKKVEVLQRYIRPDEFKRIGSWRLFFDMDEINKLVKNKKEFGDSIISDGEFAYALGIDPCMRTFIASFRLDLKTGEETNEKISSKQYHLKSKQDARNIKAERMTRVFTYDEQADLKRIAAEIGQTPSPWNISWRHYIEHRLRMSQDGIAAYSQKNYARLRLDKHIEWRRAIDLIAGKLVHFKTAIINIGAAEISPNCPIRIKKYVRCPGVRKLIAAFKRRGNCVVRLVDEYMTSQHCARCFKRFPI

SEQ ID NO: 4291 - protein, 407 aa, Sitodiplosis mosellana
MDKIQKVGNRKTFDYTIVTDSVAVSLCFLKPECPSHEYSHEQINEMYENGVFRFVLGMDPGVRTWNATVRKHIASGVEENITIDGPKYHFRAKYGKRKRKSEKWLRLFTELEQHDRNQYPFYPSPKGASNWMSYIEHRVKMLQPGMEVYTARKYIRLNLDKHIEETRASDTIAAFLTRKLPSLIFLGAAQMAPNSPIGIKKRLRCPGVRKLLNSFKKLHNCVVVMVDEFKTSQTCAKCFRPFDRRTRNDRYKVCRQCIPHAANITTDKHLSSVIISKKSNRSYQRERRHVVAEYERLNVHPVYSHGLVPKLNVWFKNWQLNTDNTWNDSRHPHQQNTVWHRDEVAAKCILYKGLCMIKGLDVHPQLSRQHHAAAAAPHNNAEGDQDDNDSDSDDDYVYVLDDVSDEE

SEQ ID NO: 4292 - protein, 1702 aa, Sitodiplosis mosellana
MATKICALASQLFLFRCERAFDDNDKGFFEQNGEKVIRSCFFGVLKKNIYKKKKMPPEFRKMVHQLDDSHRVVWPNADYFGNGMNDLIDPYVTNVKNNLKTHSKKRLREWLRVKVFESSLVARYEQADIDRVISLAIFGNDDITINGMDDVAKRERRTLLIGMVTKNSWWDIPDNNIGRFTNGKDWFKSIAFWISLQRKIDDFNTCEEYREERRCQREEFEELKRCRRRNHRPCTCQQPVDRGQNGNEYIEKGPPRVKNLAVIPICSFTRTHYTLDIRTLYWLLRQLEIVPINITEDEFREQKEYYWDQYFDMRKIYHLGRSRKKFRFRILSNGQAVSLKFDIDKTKLKPVDKKAIVQNYNKFVNEGATDPGVNTWNATTVHNIETGKEANYTISSKQYHYWTKQTVRNRQGKRWTKDFVKEERQDRENRALYPVMPSPLGRHWGDYIRHRLKMTERGIAVYTTDKYTRLNFDKFVRSNSVTDSIAGMLTNHQPTLMHFGAAQMSPSSPIGIKKSLRCPGNRKMIRSYKKCRGCVVNMVDEYYTSQTCAKCFGRFDRRTKRHHFKVCHDCRPQLVRAMLPSMIVCKVNKRKMRQEKLKLFLLEKEAEEGNGNPAVGNDVPHPDQLNPELLPKVAIYHKTWHVNESSGILEYVKFNSAGKMEVVEPRVHKTTWHRDIAAAKCILIKASQATSTTARPSPAWLITSQPSVWGTSTIRYPTTARIRDLDSLSTVDSIVNSNKNDTSSLSVSTTNRNNENASVAAVTKSIYNSNHNIPINLGANTPMSSSTFSAPPLKTIVNSDDESMVGGGGGGGDGDDDRTDDLNSQQDFGSTGKSTGGVNTINNAGAYNDDTNGLYCGSTTARNLFWNYTRVGDINVQPCPPGSTGIAKWRCSGTLLPTATKSQKSSSRNNPSADDTNDNHMDDDPLYASNTERGYMWQPSTPDLTQCRSLWLNSLEVRVNQRDSALVSIANDLSQVTNSKTLYGGDMLVTTKIIQSLCEKMTYDIETFSDQRQRESVVLELLNSVVKTGSNLLDETQQYSWMDLSFEDQMRVATSLLTGLEDNAFLLADTIAAERNVVQKVKNILLSVRVLETRNIISNQVFPDHSIEQDSNSEDSIELPRGALLENSEGGLVRIVFVAFDRLESILRPLDSGNEPKSYDSVGNEETIGPSEYAPVTTKESVNTTQSQQPRVRILNSKVISASLGKGRHIQLSQPIRLILKHLQTDNVTNPTCVFWNYIDHAWSEDGCHIDQTNRTHTICMCNHLTNFAILMDVIDDTAQFSIQIGLFDENMRILISISIAICIVFVVIALLTLKFFNGIFMKIRREYQKFVQDSWLPQCLQCVVTVDEDQPTASPANNALSANVLLPASNTSTKKKNGPVDAADVTGTFLTVSPAHHPHGQTSTLMRHHQMQRHNAMPPYSGTLREHRSGTMTPAGSSKYAGGGQKYQYDFQNPELIYPHSANSQQFHQLHADDHAKMMYYDRKMGNSSKTLKSQGSSSTQQMLSSPMKHDYSYWTGTADPTSYQLNKLSRHPNEVDPMSGGGVGSGEMMHAQGQYPSYRKKMMQQYQQQTAANPHSPSHPNMRGTFGSTGDFQGRGDNRNSWVQNANPNVRHGRQHHQQQQQMNPADAQNYNSYADEEPVYEEIMSRTTENCDGSDLNEYPHSPTRDSDNLLQNMRIANTNSTHKMDTTSAQQQQPLHSR

SEQ ID NO: 4293 - protein, 898 aa, Sitodiplosis mosellana
MGAHAIRGNRSKPRKVEDGKQKEEKAYFAIKLAAASIVRPEYRDRILPWITKTSIKCTEISELASLLFLNKVRAATEQAIITGNWEYFDDGDGMHIIENCFYAVLRRYKEDDFIMDPWFRHCFENVDIENRSAWPNNDYFGNLMKYLFQQYGRNVKTNLDTHAQKRLRYFLRLKAFRQNYTNRIRGLPDTYDERDVANAVSWAIKRYDATRGDANRLAKRDRLLRYVRDIRGPADDDIAKFTKDEDTWFASLPMWLIMQSEIETHLNWVEQHHDNIVQVIALPNIKNLVVIPICHHTRKAVRIDADVLYRMMCETGTIPRDEYGRQHTVGHVTSKSNQANYFNMIFNMEKINRVLKANKKFEHILSDGVSASILYSVKKTVVDKLVEDGLVRKRYSDGFYVYELGIDWGMKTWNATVRRRINNDKERIHNGKEMNFTINSKKYHYGTAEGVRKEKRERWTRAFGQFEESDRNNRARYDRMPSPKGSNWRDYIRHRLTIMKKAIAVYTTKKYTRLSFDHYIESNRVSDKVAAMLTNRKRCIINIGASQPPANSPIQIKKHVRCPGVRKLVKSFKKMEGNVIRFVNEARSSRLCARCFEPFPLSTLNDRVKVCEWCMPDQDDWPDGMKLPEKIVAAKSKRKLRSERRAMRQAAVQNPNQPRGFVSKVICYRKNWQQNAANGMDDNVEERRGVIIHDAELGIIEYTDEYVPEDPVDDSPVLKTVWQRDISAAKLILYRADVDPAAEFLAREKDQLAGLGDDVIPAASESNASDDAPVNSAAPVVREEPEKIKKWREEQQKRLEEKDKEEEKKKLELREQAKKELEDWYKHHEEAIGKTKASNRNAEKQFVAETAEIEPGTEWERIAKLCDFNPKSSKSSRDVSRMRSIILQLKQTPLTSNA

SEQ ID NO: 4294 - protein, 319 aa, Sitodiplosis mosellana
MSSKQFHWQTGQKVRNAKAKRWTKNFVEMERADRENRELYPVMPSPKGSMWLNYIKHRVKMMKHGICAYSTAKYTRLALDKHIKSSSVVDEWVNKVTDKKPTLFFFGADGEIPPDSPISIKKHVRYPGVRKTLRSIKKRRNCFIQLVDEWGTSQTDARCMHRFEKQDKAARFKKCRCVPDARTLLPTKIVSKLGKTDLSIYRQLQRAMNEEASEEDECLFPKVKCYYKNWRLNLECSVIWHRDVVAAKNILLKGLWTLLGLPIPGAINRYWREAAEAAAAAAARATAEATAEAAAAAVAIVDNDVEMFEYDQQPADHAV

SEQ ID NO: 4295 - protein, 714 aa, Sitodiplosis mosellana
MKRKRAQNGRPGSVKLSLNSVLRDQYRANFVAQVTNWCHTATVITVLASLLFLFENNRAFDEDNHDFFRGNGYELIKDCFKNILNENRHKLPLAFRQIIETAVPNFRWPQREGMHNAFNQLIDQYTTNVKNNIKTYSYTRIKTFFVLQRYELNLLGHNISDIDVKNATKAVMFNNIVPSANVSSKLCDLVRGSWFQTIPIFITIQRLVFNHHERFELLNDLWRRYHRDRLHNAMPSIARPPKIKNFRVIPIHDFKMKHIRIDIHLFYQMARKLGAIKLAKGLFGQPVNISKKVYDSNPFVSWDTIFNMDKIKKVGNRKTFDYAIVTDSVAVSLCFLKPECPSHEYSHEQINEMYENGVFRFVLGMDPGVRTWNATVRKHIASGVEENITIDGPKYHFRAKYGKRKRKSEKWLRLFTELEQHDRNQYPFYPSPKGASNWMSYIEHRVKMLQPGMEVYTARKYIRLNLDKHIEETRASDTIAAFLTRKLPSLIFLGAAQMAPNSPIGIKKRLRCPGVRKLLNSFKKLHNCVVVMVDEYKTSQTCAKCFQPFDRRTRKDRYKVCRQCIPHAANITTDKHLSSVIISKKSNRLYQRERRHVVAEYERLNVDSVYSHGLVPKLNVWFKNWQLNIDNTWNDSRHPHQQNTVWHRDKVAAKCILYKGLCMIKGLDVHPQLSRQHHAAAAAAQNNAEGDQDDNDSDSDDDYVYVLDDVSDEE

SEQ ID NO: 4296 - protein, 678 aa, Sitodiplosis mosellana
MQSAQKQIAANGQQVNTAVDDFNNDFFNSDGDEIIKMCFQGVLRQNYTNDRMFMVPGFRQMVVNILGEWFPWPTNRFFGNTFKYLYEQYSKNVQTNLKTHCEQRLRKFFKMRCYELNHMCLCGDLELDELFDGDDIKNAINYTYNRRDSTRGNANAIRKLEILLAELYWIGAPHRPDDPHPFNIKEFVELNWFQALRMFINIQRDIHNFHLSFANLRQSWNLFRKYPLYVQQPEFPEPPEITTFTVIPKCTFQRRHVKIDTDALHNILCGIKAMPRTKGTRVLRNGEYQQRWISQIEFKERGGWRLFFNMDEIIKLVKNKKEFGDSIISDGVSASVLFKLPKQSKTVADEDEAETKRKYFAGEFAYALGIDPGMRTFIASVRLDLNTGEETNEKISFKQYHQKSKQDARNIKAERMTRVFTYDEQADLKRIAAEIGQTPSPRNISWRHYIEHRLRMSQDGIAAYSQKNYARLRLDKHIEWRRAIDLIAGKLVHFKTAIINIGAAEISPNCPIRIKKYVRCPGVCKVIAAFKRRGNCVVRLVDEYMTSQHCARCFKRFPIWTKSKRYKKCNDCQPDERVGLPRTIYTNVSKRVLQMQRKIMRTWEEMRDQGDAIAAILTQRNSGRLVSREATLLQNLATKCCCKRWNRRRCTITQVTQITLASGHISSQTDHVQRLIIY

SEQ ID NO: 4297 - protein, 745 aa, Sitodiplosis mosellana
MTGWAIAIDPCAIVRCAAGAVCVADKGVENNDFALFGGSGEDKIKLCFEQVLWHNNQPPKPKSTYKPRGEKPRGPRAELPRIDPEFKAIVEGLDDYHRIDWPNNKDFCNGLKHLTNQYTDNVVTNLKTHANKHITQYLKLKVFRWNSDVGDDAEKFLPSDIASVVNLIIKQKDIKVPIRDPDKLVRCEVLYDIVRDCNVFPEIDLHDLTTDPKHWYKAMPMYLSMQREIEEYNSEWPHQRRPKRKKRKRKKTKGKWKRKRRQMLDNPDFRPLIRNLVVVPMCDFRRTHFKIDCSSMHQVLSSQKLLPKVEIENKKGTTSTKTIQQKDFNHSRDYWWNQYFYMRKIRRFVRAKKQFDYSINTDGISVSLQYSAKKKTDNKEIDQKSRIIQKIEDGTIKNYSGVDTGVRSWNTTTTHDIETGKETNFVMSSKQFHWQTGQKVRNAKAKRWTKNFVEMERADRENRDLYPVMPSPKGSMWLNYIKHRVKMMKHGICAYSTAKYTRLALDKHIKSSSVVDEWVNKVTDKKPTLFFFGADGEIPPDSPISIKKHVRCPGVRKTLRSIKKRRDCFIQLVDEWGTSQTDARCMNRFQNQNKAARFKKCRCVPDARTLLPTKIVSKLGKTDLSIYRQLQRAMNEEALVGDERLFPKVKCYYKNWRLNLECSVIWHRDVVAAKNILLKGLWTLLGLPIPEAINRYWREAAEAAAAVAAAAAARATAEAAAAAVAIVDNDVEMFENDQQPADHAV

SEQ ID NO: 4298 - protein, 968 aa, Sitodiplosis mosellana
MRKSIHSVAELLIKRYLLIALVVGAIAVGLDSYAYDRFIVTPFEFFKLNVLEEVGSFYGTQPWHWYFIVGLPTILGLVTIPFFFAVVQTLQNREVYPDRFNLLIATLFTLIVYSALPHKEFRFILPLLPICLHITADSMKNWSRDASRITIWIVAMLLLISNAIPAVYLSWVHQRGTIDVMLPIERIAREFRDTDGNQAKFFRTMANRFKPSIPAEGETKDEITTIKCALKTIIRPQYQQALMSKITDLSVENNDFALFGGSGEDKIKLCFEQVLWRNNQPPKPKSRYKPSGTKPRGPRAELPRIDPEFKAIVEGLDDYHRIDWPNNKDFSNGFKHLTNQYADNVVTNLTTHANKHITQYLKLKVFQWNSGVGDDAEKFLPSDIASVVNLIIKQKDIKVPIRDPNKLERCSVLYDMVNDLNVFPDIDLHDLTTGKQHWFKAMPMYLSMQREIEEYNSEWPHQRRPKRKKRKRKKTKGKWKRKRSQMLDNPDFRPLIRNLVVVPMCDFRRTHFKIDCTSMRQVLSSQKLLPKVEIENKKGTTSTTIIPEKDFNRDRDYWWNQYFYMRKIRRFVRAKKQFDFSINTDGISVSLQYSAKKKTVNKEIDQKSHIIRKIKDGTIKNYSGVDSGVRSWNTTTTHDIETGKETNFVMSSKQFHWQTGQKVRNAKAKRWTKNFVEMERADRENRELYPVMPSPKGSMWLNYIKHRVKMMKHGICAYSTAKYTRLALDKHIKSSSVVDEWVNKVTDKKPTLFFFGADGEIPPDSPISIKKHVRCPGVRKTLRSIKKRRDCFIQLVDEWGTSQTDARCMNRFQNQNKAARFKKCRCVPDARTLLPTKIVSKLGKTDLSIYRQLQRAMNEEALVGDERLFPKVKCYYKNWRLNLECSVIWHRDVVAAKNILLKGLWTLLGLPIPEAINRYWREAAEAAAAVAAAAAARATAEAAAAAVAIVDNDVEMFENDQQPADHAV

SEQ ID NO: 4299 - protein, 772 aa, Sitodiplosis mosellana
MGGKRIGAHAIRGNRSKPRKVEDGKQKEEKAYFAIKLAATSIVRPEYRDRILPWITKTSIKCTEISELASLLFLNKVRAATEQAIITGNWEYFVDGDGMHIIENCFYAVLRRYKEDDFIMDPWFRHCFENVDIENRSAWPNNDYFGNLMKYLFQQYGRNVKTNLDTHAQKRLRYFLRLKAFRQNYTNRIRGLPDTYDERDVANAVSWAIKRYDATRGDANRLAKRDRLLRYVRDIRGPADDDIAKFTKDEDTWFASLPMWLIMQSEIETHLNWVEQHHDNIVQVIALPNIKNLVVIPICHHTRKAVRIDADVLYRMMCGTGTIPRDEYGRQHSGSDVTSKSNQAYYFNMIFNMEKINRVLKANKKFEHILSDGVSASILYTVKKTVVDKLVEDGLVRKRYSDGFYVYELGIDWGMKTWNATVRRRINNDKERIHNGKEMNFTINSKKYHYGTGEGVRKEKRERWTRAFGQFEESDRNNRVRYDRMPSPKGSNWRDYIRHRLTIMKKAIAVYTTKKYTRLSFDHYIESNRINDKVAAMLTNRKRCIINIGASQPAANSPIKIKKHVRCPGVRKLVKSFKKMEGNVIRFVNEARSSRLCARCFEPFPLSTLNDRVKVCEWCMPDQDDWPDGMKLPEKIVAAKSKRKLRSERRAMRQAAVPNPNQPRGFVSKVICYRKNWQQNAANGMDDNVEERRGVIIHDAELGIIEYTDEYVPEDPVDDSPVLKTVWQRDISAAKLILYRGHCELFGHRLHDAFTRQHLVYPTRFRVNFNIH

SEQ ID NO: 4300 - protein, 465 aa, Anadara kagoshimensis
MWEATISCKPPVDWWNGNLRIKTLETDKNGKGESYNIHVGDNDDDNEEFLTTYMVGLQPDVDQRRVLNEMIRVSNHAYNLCIHLVKNKGVKPSQKELQKIVVKTNAKDVDSKHRLDGDDWFFENKMSTIKLTACREYSQKYSIGAKKKKKLGTDKFLPTKEKGETENEITGSVGVQKLYVNKLTEKHKKRFPTHREDKHLMIFPVSLIRPIRLTKSVRKLPPFDHDMRIIKRADGYFILCIPCKPEYTRRKFNKEGQKGVCGVDPGGRTMATIYDPVNRHAWQVGTKRDKKYLIKPLQKKIDVVMAQLQLAIEKEQKSRIMDKKRELKKLHTKMKWIINNIHCDFSNELVKTNKLVVLGDMKTAKIVNKTEKKGLPRKANRDLIEWRHYEFKKRLIHRAKGSGCKVVIQDEAYTSKTCGRCGRMNANLGSAETFVCDTCKYETHRDVNGARNILRKYTKHFFTYK

SEQ ID NO: 4301 - protein, 465 aa, Anadara kagoshimensis
MWEATISCKPPVDWWNGNLRIKTLETDKNGKGESYNIHVGDNDDDNEEFLTTYMVGLQPDVDQRRVLNEMIRVSNHAYNLCIHLVKNKGVKPSQKELQKIVVKTNTKDVDSKHRLDGDDWFFENKMSTIKLTACREYSQKYSIGAKKKKKLGTDKFLPTKEKGETENEITGSVGVQKSYVNKLTEKHKKRFPTHREDKHLMIFPVSLIRPIRLTKSVRKLPPFDHDMRIIKRADGYFILCIPCKPEYTRRKFNKEGRKGVCGVDPGGRTMATIYDPVNRHAWQVGTKRDKKYLIKPLQKKIDVVMAQLQLAIEKEQKSRIMDKKRELKKLHTKMKWIINNIHCDFSNELVKTNKLVVLGDMKTAKIVNKTEKKGLPRKANRDLIEWRHYEFKKRLIHRAKGSGCKVVIQDEAYTSKTCGRCGRMNANLGSAETFVCDTCKYETHRDVNGARNILRKYTKHFFTYK

SEQ ID NO: 4302 - protein, 239 aa, Anadara kagoshimensis
MRIIKRADGYFILCIPCKPEYTRRKFNKEGRKGVCGVDPGGRTMATIYDPVNRHAWQVGTKRDKKYLIKPLQKKIDVVMAQLQLAIEKEQKSRIMNKKRELKKLHTKMKWIINNIHCDFSNELVKTNKLVVLGDMKTAKIVNKTEKKGLPRKANRDLIEWRHYEFKKRLIHRAKGSGCKVVIQDEAYTSKTCGRCGRMNANLGSAETFVCDTCKYETHRDVNGARNILRKYTKHFFTYK

SEQ ID NO: 4303 - protein, 389 aa, Spodoptera exigua
MQILKAYKFRLEPTEQQAQRLRQLCGCARYVWNHGLAETKSILDSGEKIPSAFELNRMLTCWKKDPEMAFLGEAYTDNLQQKLKDLQGAWMRCFDKKLAAKAPVFKKKSDNRDSIRFVNFDKYCRLEKGRVKLPAGLAWVKFRQSRPVEGKIKNATVSQSAGHWYISFQVEQELPEPIHPSGSMVGLDAGIAKLATLSDGTVFEPVNSFKTNQLKLARLQRQLSKKVKFSSNWKKQKGKIQRLHSHIANTRRDYLHKVTTTISKNHAMIVIEDLKISNMSKSAAGTTSQPGRNVRAKSGLNRSILDQGWFELRRQLEYKQAWRGGQVLAINPAYTSQQCACCGHTERGNRQTQNQFKCVACGIEVNADVNGARNILAAGHAVLACGGAV

SEQ ID NO: 4304 - protein, 408 aa, Spodoptera exigua
MQILKAYKFRLEPTEQQAQRLRQLCGCARYVWNHGLAETKSILDSGEKIPSAFELNRMLTCWKKDPEMAFLGEAYTDNLQQKLKDLQGAWMRCFDKKLAAKAPVFKKKSDNRDSIRFVNFDKYCRLEKGRVKLPAGLAWVKFRQSRPVEGKIKNATVSQSAGHWYISFQVEQELPEPIHPSGSMVGLDAGIAKLATLSDGTVFEPVNSFKTNQLKLARLQRQLSKKVKFSSNWKKQKGKIQRLHSHIANTRRDYLHKVTTTISKNHAMIVIEDLKISNMSKSAAGTTSQPGRNVRAKSGLNRSILDQGWFELRRQLEYKQAWRGGQVLAINPAYTSQQCACCGHTERGNRQTQNQFKCVACGIEVNADVNGARNILAAGHAVLACGGAVQSGRPMKQEPGTARAAITQ

SEQ ID NO: 4305 - protein, 248 aa, Spodoptera exigua
MAKSKAPLDVRWSRPLPSVPSSIIISKDSAGRYFVSCLCEFEPVSLPIAAKTAGIDVGLTDLFVTDTGFKTGNPRHTAKYAKRLALLQHRLSKKKKGSKNRAKARLKVARIHAKIADCRLDNLHKLSRKLINENQVVCVESLKVKNMIRNPKLSKAIADEGWGEFVRQLEYKGEWSGRSVVAIDQFFPSSKRCSGCGYTMPKMALNVRSWVCPECGANHDRDVNAAKNIKAVGLTALAHGATLNPEAA

SEQ ID NO: 4306 - protein, 938 aa, Begonia darthvaderiana
MVETYGELNADKSNAILICHALSGSHHAAGYHSSDDKKAGWWDTFIGPGKAIDTTRFFVVCLNNIGSCYGSTGPTSTNPETGKPYGPDFPLVTIKDWVKTQVMLSDYLGIYIWHAIVGGSMGGMQAMQWSIDYPSRLKKCVVIASTPKLSAQNIAFNEVARQSILSDPDFCEGRYIEQGKIPKRGLILARMVGHITYLTDEAMRVKFGRDLKAGKLMFNYDVEFQVESYLRYQGEQFSERFDANTYLLMTKALDYFDPARGAIEDDSINDSLSDTDALRLALANTQCCGNGDLLAHLQNKLGVFGYGIEIDQTKINDCITKGVNVIEQDLNDGLARFADASFDTVVMARALQAVKEPDQLLLDMVRVGKEVIVTFPNFAHWQNRIHLGIKGMMPMSEALPFAWYNTPNIHLCTFKDFEKLCDDNDIRLSGVASAELVANIPLNGSRYDSMEPMALLSQAKSGNQQAQFFLAKRYQKGLGIQQNFQQAIQWYTTAAKQDIAPAQLNLAMMYIRGEGVQPNAGQARYWLEKAAKLGDNRASYTLAMLDEKEKKLVDAYKWYDLAARDGMLSDQVRTRAQSKIGQLALNLSSQDIATARSRADSWFQSKHLQKTGKFFSAYDLNEYTKGSGELLGLHSQTIQAINETHAKSRKQFKKAKLSWRTNNPNSKRKSLGWLPFKQSAIKHIATHQTGKKGLKSTLQLSLAKGQKLIIDLWDSYNLSLYQINTLEVVQDSRNRWYACITVKDYPKQSCGTGSVGIDLGLKESATTSNGDKLQIKQTLKYAKALATAQRAKNKKRVKAIHAKIKHTRQDLIHKFTTRLVKDNALIVVGDVKTNQFNSKKGKLAKSVYDAGWFEMKRQLTYKCENAGCRFEIVNEKYTTQRCSCCGEITDNSPKGRKSLGIREWTCASCGTWHDRDINAAKNILAVGLDRLAEEIPER

SEQ ID NO: 4307 - protein, 1467 aa, Begonia darthvaderiana
MKTLKLRIRDKQVDQLNRLSGAVNFVWNYVNDLSYRHLQKTGKFFSAYDLNEYTKGSGELLGLHSQTIQAINETHAKSRKQFKKAKLSWRTNNPNSKRKSLGWLPFKQSAIKHIATHQTGKKGLKSTLQLSLAKGQKLFIDLWDSYNLSLYQINTLEVVQDSRNRWYACITVKDYPKQSCGTGSVGIDLGLKDSATTSNGDKLQIKQTLKYAKALATAQRAKNKQRVKAIHAKIKHTRQDLIHKFTTQLVKDNALIVVGDVKTTQFNSKKGKLAKSVYDAGWFEMKRQLTYKCENAGCRFEIVNERYTTQRCSCCGEITDNSPKGRTSLGIREWTCASCGTWHDRDINASKNILAEVAMKGLTLTDVFGASIDKPTLPSLFISHGAPTIAIEDTPFTQALHQLGADLPKPKLILIMSAHWESGEWLINANPAPSTLHDFGGFPKALFEIQYPAAGHTAAAQSIAKQLAQMQVAVKVVDNQPFDHGVWTPLLHMYPNADVPIVQVSLPHGFSPSQLYQLGQLFAPLRQQGVLIVASGSITHNLYGVRFNSQQIEPQAKTFKHWIIDQLKTNDKTMFDWQTHSLARHNHPTPEHLLPVFFARGAGDVMSVVHESFAHYNLGLIGVYESLLYKWIGDIVNWLGAYTPANLWAEKGDSLLMMAAVLVVSPILVGLSSLIHFQTLQGVFPMQMRWRFHRQMLGQSMQFYQDEFSGRVSAKVMQTALAVRDTIMTIADMLVYVLVYFVSSGIILFHLDGWLLIPFLLWMVMFFATVAYFIPKLKNSASRQADARALMTGRITDAYANITTVKLFSHSRRELTYAKDAMSQFLDTVHDQMRWVSRLELVNHLINVVLVGTTVALGLYLWYYNGLSVGAIAAATAMAMRLNGLTHWIMWQTAALFENIGTVQDGMKTLSKPHTVVDKPNARDLLITQGEINFSHVDFNYGRSGNKTNDTDAKQKLLDDFNLEIKAGEKIGLVGRSGAGKSTLVNLLLRFYDVDGGAILIDNQNISDVTQESLRQQIGMVTQDTSLLHRTVRENIAYGRPDATDEQIISAAKQAHAWEFIQHLSDAKGNVGLDTQVGERGVKLSGGQRQRIAIARVMLKNAPILLLDEATSALDSEVEYAITDSLNDMMAGKTVIAIAHRLSTIASMDRLVVMDRGQIVEQGSHAQLLAQNGVTIGMEEQRIKLNGKNAKYYNIKNPTASQTAHFYGGNGFALGVYEPLLSDLAQHLNITALTMRGEWYDKPTADKMTREEDADVLIEFLQKTQDKPIIGIGHSQGATATTIAAAKRPDLFSALYLLEPVTFTNQQGKLYSLVPRMVKMTREPFKSTQVKQANWGSVDAYYQFLRRHKAYKRITDEHLLTYAKNSLEPGEQAELTLRFSPKQELANYFGTPLIMKPLQQLIADNKVPVQLIIGKPSMFISQQVRQMWDKFVPSEQMTVLNDYGHLLPLEAPELCAKLIFQKLKLTS

SEQ ID NO: 4308 - protein, 2192 aa, Begonia darthvaderiana
MKTLKLRIRDKHIDQLNRLSGSVNFVWNYVNDLSYKHLQKTGKFFSAYDLNDYTKGSGELLGLHSQTIQAINETHAKARKQFKKAKLSWRTNHSNSKRKSLGWLPFKQSAIKHIATHQTGKKGLKSTLQLSLAKGQKLIIDLWDSYNLSLYQINTLEVVQDSRNRWYACVTVKDYPKTQCGTGSVGIDLGLKDSATTSSGDKLTIKQTLKYAKDLAIAQRAKNKQRIKAIHAKIKNTRQDLIHKFTTQLVKDNALIVVGDVKTNQFNNKKGKLAKSVYDAGWFEMKRQLTYKCENAGCRFEIVNERYTTQRCSCCGEITDNSPKGRKSLGIREWTCAKCGTWHDRDINAAKNILAVGLDRLVEGIPLLKQGEEVIVTALSHIRNFSIIAHIDHGKSTLADRIIQMCGGLQAREMQAQVLDSMDIERERGITIKAQSVTLYYNHPNGDKYQFNFIDTPGHVDFSYEVSRSLAACEGALLVVDAAQGVEAQSVANCYTAIEQGLEVLPVLNKIDLPQVDPERVIQEIEDIIGIEAMDAPRVSAKTGVGVDDLLQAIVERIPAPEGDRDAPLQALIIDSWFDNYLGVVSLVRVRQGTLKKDDKIHIKSTKGTHIVTSIGVFTPKSFETNILEAGEVGFVIAGIKDIGGAPVGDTITLAKTPDVDSIPGFKKVKPQVYAGMFPVDSSDFEAFREALQKLQVNDAALFFEPDTSDALGFGFRCGFLGMLHMEIIQERLEREYDLDLITTAPTVIYEIKKRSGEIIQIDNPSKMPDPGLIDEFREPIARCHILVPPDYLGNVMTLCIERRGIQVDMKFMGQQVQLTFDIPMGEVVMDFFDRLKSVSRGFASLDYGFERFETDKLVRVDVLINGEKVDALAMICHAEQARYRGNQLVEKMKELIPRQMFDVAIQAAIGSQIIARSTVKAMRKDVLAKCYGGDVSRKKKLLSKQKEAIVLVVRSFLIEPFNIPSSSMVPTLYTGDFIAVNKYAYGIRLPLVNTKVLDLGAPQHGDVVVFRYPENPKIYYIKRVIGVGGDTVSFNNGQLSVNGKAIATTPANFTPDPKMTAQLYPPGKTETGELVTAEQAAQLGNQEEQTAQYVQESPSSNHQHLVRYLGDKNWFQYASFLQQASPQLMASQGQQWQLTVPEGHYFVMGDNRDRSADGRFWGFVPDENLAGKAVRIRHEPTKSSARRQRNSQKAEDVVEVVDNTPGEMSVKLKYDEANNFFGNVDIVNRFEDTISAEDAKMNLPITIPTFNLKKLPPQVRQLTALFYQMGYQFDNVNLPIMALMHRSFDSEHNYERLEFLGDALLGVIIAEALFLRYPDYNEGRLSRLRASLVREETLVIIAKQLNLSDYLILGVGERKGGGRQRASILADSVEALIGAIYLDSQNFDTVKACVLAWFEDLFEKVKEQKVLKDAKSRLQELLQAHQLALPRYEVTETIGNAPNQIFVVSCQVEIIFDNKTAKPIAPTQALVTAQGESRRIAEQRCAEAMLNATQQTTTDPAVDNPSADNNQDVISQFFSGQSEAAPVRAVDFRTGYVAIVGRPNVGKSTLMNHVLGQKLSITSRKPQTTRHRIMGILTNEQLQAIFVDTPGIHSREVRAINERMNKAATSALADVDAVLFVIDSLKWVEDDELVFAKVQNLGVPVIAVVNKSDTIKDEAQLFALLQKLHDTQVFSDIVPVSALRAHNLDELVRVIGKHLPIAAPIYDAEQVTDRSERFLASEIIREKVMRASGDEIPYDLTVQIDTFKDEPAHQDPKTGKWRKAVTFIDATIFVERQGQKVIVIGDKGEKIKQIGIEARQDMEKMFDKKVMLTLWVKVKKGWSDDERQSLYAGMYLNEILQKLLPVEEPFAEIWQAYQQCLANMTTLFVDLAQSPYDMTRLKWYLRRFENVLFEQLGYGFDFAKDALGDLIILSQHYQYQLQQGFMPVLPLDKTDIALTGNVMTSNQPLLGVNIDHIATLRQARGVAYPDPVVGALICEQAGADGITLHLREDRRHIQDDDVYRLAKVITTRMNLEMAVTDEMVAIACDVKPAWVCFVPEKRQELTTEGGLDVIGNQHKIASAIQQLHQVGTQVSLFIDPELAQIDKSIALGADAIELHTGAYADYCLQHDQVKISHEITRIKTAVTHAHEAKASLLVNAGHGLTRDNVAPIADIDGIHELNIGHAIIADSVFMGLSEAVSAMRKAFTAKA

SEQ ID NO: 4309 - protein, 979 aa, Begonia darthvaderiana
MKTLKLRIRDKHTDKLNRLSGSVNFVWNYVNDLSYKHLQKTGKFLSAYDLNEYTKGSGELLGLHSQTIQAINETHAKARKQFKKAKLNWRTNNPNSKRKSLGWLPFKQSAIKHIATHQTSKKGLKSTLQLSLAKGQKLIIDLWDSYNLSLYQINTCELVQDSRNRWYACITVKDYPKTQCGTGSVGIDLGLKDSATTSSGDKLTIKQTLKYAKQLAIAQRSNNKKRIKAIHAKIKNTRQDLIHKFTTQLVKDNALIVVGDVKTTQFNSKKGKLAKSVYDAGWFELKRQLTYKCENAGCRFEIVNERYTTQRCSCCGEITANSPKGRKSLGIREWTCATCGTRHDRDINASVGGTPVFISRARGSKMYDTEGKPYIDYVGSWGPMILGHAHPHIIEAVKNAADDGLSFGAPTTFETTVADKICELIPSVELIRMTSSGTEATMSAIRLARGYTGRDKIVKFEGCYHGHSDSLLVKAGSGMLDIGEPSSKGVPADFAKHTITIRYNDPQAIKDCFAQFGNDISCVIVEPIAGNMNMIVPTQEFHDTLRAECTAHGAVLIFDEVMTGFRVGLQSAQAHFGITPDLTTFGKIIGAGLPVGAFGGKREIMECIAPLGGVYQAGTLSGNPLAMRAGIAMFDLLTAEGFYDALSEKVVYLTDNLEQLAKEAGIGFKTTRCGGMFGMFFTDSDTLPQNFEEVCQCDAQKFATFFHGMLDRGVYLAPSAFEAAFISSEHSQEDLDATLQAAKEVFSEMAKRNLEESQQPQSFFDDFAKSVTLYRDDDIWVIDKPHGLLSVDGKELKVSLQSRLLKADPNVKLIHRLDMDTSGIIIFARHSEAQSHISKQFIERIPSKEYQALVWGTPPQQGEIDVPVRYDPPQKPKHIVDMNWDKRAYTKYETLHHELREGKAVSRVALYPVTGRSHQLRVHMLHIGHVMLGDPIYAQDVLDGQAFDLSPRLCLHARKLRLKHPNTGVWMEWESPVPF

SEQ ID NO: 4310 - protein, 1449 aa, Begonia darthvaderiana
MIRELAKNIIYTGVAGTGKTYQLQQIAKCYTELLPVATQDDLLKNLVEPLSWREVICLVLLDEKQKGKSLLKVPELVQSAIFLAKASLKDRKENLNQTVWGTLQQFSNPNSLTVKYNSRASQAFFDKDESSNWFLLPESLPLLSDLQTKLTDYQTALNNQFQPKIERFSLVSFHQAYGYEEFVEGIRPHIADNGQMSYRIESGAFLRLCQQAKHDPSHRYAMLIDEINRANVARVFGELMSLIEPTKRAGQTDSLSVNLAYSHQPFSVPSNVDIYATMNSQDHSLAPLDIAFRRRFEFIECQPQPQLLGKVMANGIEIDLAKLLTALNERISQNLAKDSQLGHSFLWGIDSLQALSAAFSQSIIPQVAQACQQHGQILQAIFGQTFIRLIDNKKATGFMAQQADFDDEQDFDWLIEQNFDVFRIERKQQQWQLKVRHYIGVIGLPSGGQVEILPKLAQSQITHADEVTQTRQWVQQMLTAVWQALLPKSLANLANQLLINPAAPNPPPINHSLSLSEWLQAYFWQGFAQYVPNQQYQQFEQNQPYLQGKLLVKEQLQHNFHQPHKFYHQTENFAMDTAGNRLVKTTIERVIGSMAMPLPSPWQAVATVAKDLYDILFSQALQELTALPSLLAQRNYTFISFCYALLTLQQASSQGQFLTPTWLVNMPFAFEKWVGRKIQQQFAAQNFELVEQKRQPLTVQQGLTIKPDIWLKSADKLIIADTGKFFSAYDLNEYTKGSGELLGLHSQTIQAINETHAKSRKQFKKAKLNWRTNNPNSKRKSLGWLPFKQSAIKHIATHQTGKKGLKSTLQLSLAKGQKLVIDLWDSYNLSLYQINTCELVQDSRNRWYACITVKEYPKTTCGTGSVGIDLGLKDSATASNGDKLQIKQTLKYAKALAIAQRAKNKQRVKAIHAKIKNTRQDLIHKFTTQLVKDNALIVVGDVKTTQFNSKKGKLAKSVYDAGWFELKRQLTYKCENAGCRFEIVNEKYTTQTCSCCGDMSSSLSGRAGGIASINRAASYGKKCALIEAKQLGGTCVNVGCVPKKVMWYGANMAAAIHHYAPDYGFDLEVKQFDFAKLVQSRQAYISRIHQSYNNSLKNNQVDVIHGFAKFADKHTVEVYKNDGTVETITADHILLAMGGRPVRPAIEGAELGIDSDGFFDLTELPQRVAIVGSGYIGVEIAGVMNALGSKTHLIVRSKRVLKNFDADIVTTLTHIMHDDGIEFHYGLLPQQIRKNQDGSLSIELSNNETLTVDCLIWATGRAPATDTINLDKAGVEVNEQGFVKVDAYQNTNVEGIYAVGDIIEHGIQLTPVAVAAGRRLSERLFNNKPNEHLDYNLVPSVIFSHPPIGTVGLSEEEAVKGYGINAVKVYKSSFTPMYSAVTKHREPCHMKLICVGEEEKVVGLHGVGFGVDEMIQGFAVAIKMGATKRDFDDTVAIHPTGSEEFVTMR

SEQ ID NO: 4311 - protein, 381 aa, Micropterna sequax
MTAIGAPPQLPAKARPSILSTMLRLQTYKYELMPNGAQERDMRRFAGACRFVYNKALTLQKENHEAGGKFIGYVAMANLLPAWKKEFAWLKDSPSQTLQHALKNLERAYKNFFEKRTDFPRFKKRGVADSFRFPQGFEVDQANNRIKLPKLGWITRFATLSDGSFIAPLNSFKKHQIRLARYQCCMARKVKFSKNWRKAKSKVQKIHSHIAHCRKDFLHKASTSISQNHALVCVEDLQIRNMSKSSKGNGKNHGKRVRQKSGLNRSILDQGWPEFRQQLEYKTHWNGGVVVAVGPHYTSQACPACGHVAKENRQTQAKFACLDCGYENNADVVGAMNVLARGHRVLACGEGGSGLVRKRKTKPASVKQEPFAVTICEVTHA

SEQ ID NO: 4312 - protein, 589 aa, Zelostemma sp.
MVKNPPGPCQKCGSSTHSRSSSKKCPDHGPPRRKRKHLDAGITKADEKITTRKCALRNERIYDKIQEDVLEMSSLFVEASMYIHFCLYKKWAVGEFPEKAYDFLPYYYHLLDGSRAKYVMDTEYEGLRCSLYTARTYDKKYRSNLFVKHAQQYATLFHNNLWMHAYTRLRRFMREFTEDKTTIYQTLDALFTRTSQHKPDPLLIEEMKQRLDYDGITPLHDIQTKAGYHKHIALFYKLQRYNNENKLRNFKLVPILKHGRHHVQYDSLALHQLLSSLGLISGAHTDMENEEWHKWFDIRRVETKRKTFGYSLQTDGVALSLSMSEFTVNAQQPPKTKKVKRKDGKVLSKACDLSEIREKDSANKYDQFIGLDPGARLVMGGVAINESSDRRLIKISSKRYHHMAGFGSRKQKLLDWTSDVEKKSKTTLEPHDYEAYTKHRLTHFAERQAFYSKRKITRLKFKKYICTEQASKAVAHEIVGDGDSENRKRYHHRTVVFVGDTQIAANSPIRDYVRTPNRRILWHLEQIADVLRIEEFRTTKLCSDLQSLQSFCSFYRYKLWYRVGAGCQRWQQHSPYRTGSSCARPAVAE

SEQ ID NO: 4313 - protein, 215 aa, Saxidomus purpurata
MCGIDPGGRTFATVFDPTNVNAFQVGLKEDKHFVMSKLHKQIDESQAYLQNAEEKKHEQEKQNRTTQLKKLHLKLRTFVYDIDLKLSQFLVRNYKYVALGKIGVANIVRKDRPGHLSKKSNRDLLCWRHYAFRTRLEHRAKGTDCEVVVQEESYTSKTCGVCGVKKENLAANEVFFCHSCHYQTHRDKWSAKYSAEIAQTVSIQLNILTMRSIIT

SEQ ID NO: 4314 - protein, 227 aa, Saxidomus purpurata
MKRANGRFVMQLPCDPHWTRDNSNDNFEKSVCGIDPGGRTFANVYDPFKKTMYKVGIEEDKDFDLRPIHDKIDETHWYLNNAQKRKQINAFEDRKTQLKKLHLKLKTFVEHIHKTLCSHLVKHYELFSLGKLSVSRIVKKEVGKRGLPRRAKRDLLCWQQYQFRQRLYERSIGTSCEVIIQDEAYTSKTCGVCGVINKTVGASETFTCNSCSYETNRDVNGSRNILL

SEQ ID NO: 4315 - protein, 477 aa, Saxidomus purpurata
MKRQREKATLWDAAIVDTHETFWHWWQYIRRNDYPGDVKETMGFSELQKNVKRLKPDTETVKTTFSVGLRPTKSQKIVLNHMLKVSNQAYNYSNYLVREKRLKAKHFDLQKYVSKSNADAIPDEYRMTNDDWYFENKMSCIKGTSCKHFCTMYKSAQTNQKKRDVILKDKDIVYLREGSFQVPKKYLRSLNAKDTKDSSILNKCITFLGDNFSRARNNGKERFMRLAKPVNKLPPITHDVRISKRANGKFVLQIPCDPKYTRRSSSSQNTDAMCGIDPGGRTFATVFDPTNVNAFQVGLKEDKQFVISKLHKKIDKSHACLQNAIEKKHEQEKQNRITQLKKLHLELKTYVDDIHLKLSQFLVRNYKYVALGKIGVASIVRKDRLGHLSKKSNRDLLCWRHYAFRTRLEHRAKGTDCEVVVQEESYTSKTCGLCGIKKQNLGANEVFVCDSCHYQTHRDINGARNILLKSLKLFPFN

SEQ ID NO: 4316 - protein, 267 aa, Saxidomus purpurata
MKNNFKEPVQINRKIDKIPPFSHYFRIVKRANGRFVLQLPCDPFWTRSDNSNDNIEKSACGIDPGGRTFATLYDPVKKTTYQVSIEEDKEFDLRPIHDKIDETHWHLTNAQKRDQVKAIEDRKTQLKKLHLRLKTIVKHIHETLCLHLVKHYQLVSLGKLSVSRIVKKEVGKRGLPRRAKRDLLCWQHYQFRQRLQDRSIGTSCEVIIQNEAYTSKTCGVCGVINKTLGASEIFTCNSCTYETNRDVNGARNIVLKTLKIFPFANVV

SEQ ID NO: 4317 - protein, 479 aa, Saxidomus purpurata
MKRKRPDITLWDACNVQTHGAMWRWWKSIHLKEHKGGDSQTECIDDVDIIKTLSGFSSKIRRKEDSDKFLTTFSVGLKPTRFQKKILNLMLKVTNYTYNWCFYLVNEMNFPAKQVILQKTVCRTNSKDVDPVYRLPGDEWFFENKMSGIKLTACRIFCTSCHIAKKKGYKLKQKRDVSNCIREGSIGIQKAYVRSLTAKDRCRGPRSKHLVIMKNNFKEPVRINRKIDKIPPFSHDFKIAKRANGRFVLQLPCDPHWTRRDNSNDNVEKSVCGIDSGGRTFATIYDPVKKTTYQVGIEEDKEFDLRPIHNKIDETHWHLTNAQKRDQAKAIEDRKTQLKKLHLRRKTIVKHIHTTLCSHLVKHYELVSLGKLSVSRIVKKEVGKRGLPRRAKRDLLCWQHYQFRQRLPDRSIGTSCEVIIQNEAYTSKTCGVCGAINKTLGASETFTCSSCAYETNRDVNGARNILLKTLKMFPFANVA

SEQ ID NO: 4318 - protein, 479 aa, Saxidomus purpurata
MKRKRPDITLWDACNVQEHGTMWRWWKSTRLREDKGDNGQTECIDEVDMIKTLSGFSSKLRRKEDSDSFLTTFSVGLKPTRFQKNVLNLMLKVTNYTYNWCFYLVNEMNVPAKQVILQKTVCRTNSKDVDPVYRLPGDEWFFDNKMSAIKKTACRIFCSSCNTAKKKGYKLKQQRDVSNCIREGYIGIQKGYIRSLTAKDKCRGPRSKHLVIMKTNFIEPVRINRSVDKIPPISHDFKIMKRASGRFVLQLPCDPHWTRRDNSNDNFEKSVCGIDPGGRTFATVYDPVKKTTYQVGIKEDKEFDLSPIHDKIDETHWHLTNAQKRDQAKAIEDRKTQLKKLHLRRKTIVKHIHTTLCSHLVKHYELVSLGKLSVSSIVKKEVGKRGLPRRAKRDLLCWQHYQFRQRLQNRSIGTSCEVIIQNEAYTSKTCGVCGVINKTLGASETFTCNSCSYETNRDVNGARNILLKTLKMFPFANVA

SEQ ID NO: 4319 - protein, 479 aa, Saxidomus purpurata
MKRKRPDITLWDACNVQKHGTMWRWWKSIRLKEDKGGESQTECIDDVEMIKTLSGFSSKIRRKEDNDKFLTTFSVGLKPTRFQKNVLNLMLKVTNYTYNWCFYLVNEMNVPAKQVILQKIVCKTNSKDVDPIYRLPGDEWFFENKMSTIKLTAYRNFCTSCNIAKTKGYQLKQKRDVSNCIREGSIGIQKAFIRSLTVKDKCRGPRAKHLVIMKNNFKEPVRINRNVDKIPPFAHDFRIVKRENGRFVLQLHCDPHWTRRDHSNDHFEKSVCGIDPGGRTFATVYDPVKKTTYQVGIEEDKEFDLRPIHDKIDETHWHLTNAQKRDQAKAIEDRKTQLKKLHFRLKTFVKHIHTTLCSHLVKHYGLVSLGKLSVSRIVKKEVGKRGFPRRAKRDLQCWQRYQFRQRLQDRSIGTSCEVIIQKAAYTSKTCGVCGAINTTLGASETFTCNSCAYETNRDVNGARNILLKTLKMFPFANVA

SEQ ID NO: 4320 - protein, 373 aa, Saxidomus purpurata
MKRQTEKVTLWDAAIVDTHETFWHWWQYIRRNDYPGDVKETVGFSELQKNVKRLKPDIETVKTTFSVGLRPTKSQKIVLNHMLKVSNQAYNYSNYLVREKRLKAKHFDLQKARNNGKERFVRLAKPVNKLPPIAHDVRISKRANGKFVLQIPCDPKYTRRSSSQNTDAMCGIDPGGRTFATVFDPTNVNAFQVGLKEDKQFVISKLHKKIDESHAYLKNAEEKKHEQEKQNRITQLKKLHLELKTYVDDIHLKLSQFLIKNNKYVALGKIGVANIVIKDRPGHLRKKSNRDLLCWRHYAFRTRLEHRAKGTDCEVVIQEESYTSKTCGLCGIKKQNLGANEMFVCDSCHYQTHRDINGARNILLKSLKLFPFN

SEQ ID NO: 4321 - protein, 477 aa, Saxidomus purpurata
MKRQREKATLWDAAIVDTHETFWHWWQYIRRNDYPGDVKETMGFSELQKNVKRLKPDTETVKTTFSVGLRPTKSQKIVLNHMLKVSNQAYSYSNYLVREKRLKAKHFDLQKYVSKSNTDAILDEYRMTNDDWYFENKMSSIKGTSCKHFCTMYKSTQTNQKKRDVILKDKDIVYLREGSFQVPKKYLNSLNVKDTKDSSILNKCITFLGDNFSRARNNGKERFMRLAKPVNKLPPIAHDVKISKRANGKFVLQIPCDPKYTRRSSSSQNTDAMCGIDPGGRTFATVFDPTNVNAFQVGLKEDKQFVISKLHKKIDESHAYLKNAEEKKHEQEKQNRITQLKKLHLELKTYVDDIHLKLSQFLVRNYKYVALGKIGVASIVRKDRPGHLSKKSNRDLLCWRHYAFRTRLEHRAKGTDCEVVVQEESYTSKTCGLCGIKKQNLGANEVFVCDSCHYQTHRDINGARNILLKSLKLFPFN

SEQ ID NO: 4322 - protein, 479 aa, Saxidomus purpurata
MKRKRPDITLWDACNVQKHGTMWRWWKSIRLKEDKGGDGQTECIDDVEMMKTLSGFSSKIRRKEDSDKFLTTFSVGLKPTRFQKTILNLMLKVTNYTYNWCFYLVNEMSFPAKQVILQKIVCKTNSKDVDPIYRLPGDEWFFDNKMSAIKLTACRNFCTSCQIAKKKGYKLQQQRDVSNCIREGSIGIQKAYIRSLTVKDKCRGPRAKHLVIMKNNFKEPVRINRKIDKIPPFSHDFKIVKRANGRFVLQLPCDPHWTRRDNSNDNFEKSVCGIDPGGRTFATLYDPVIKTTYQVGIEEDKEFDLRPIHDKIDETHWHLTNAQKRNQAKAIGDRKTQLKKLHLRRKTIVKHIHTTLCSHLVKHYELVSLGKLSVSSIVKKEVGKRGLPRRAKRDLLCWQHYQFRQRLQDRSIGTSCEVIIQNEAYTSKTCGVCGVINKTLGASETFTCNSCSYETNRDVNGARNILLKTLKMFPFANVA

SEQ ID NO: 4323 - protein, 479 aa, Saxidomus purpurata
MKRKRQDITLWDACNVQEHGTMWRWWKSIRMKEDKGGDCQTECIDDVEMIKTLSGFSSKIRRKEDNDKFLTTFSVGLKPTRFQRNVLNLMLKVTNYTYNWCFYLVNEMNFPAKQVILQKIVCKTNSKDVDPIYRLPGDEWFFDNKMSAIKLTACRNFCTSSNIAKKKGYKLQQKRDVSNCIREGSIGIQKAFIRSLTVKDKCCGPRSKHLVIMKNNFIEPVRINRKIDKIPPFSHDFRIMKRANGRFVLQLPCDPHWTRRDNSNDNFEKSVCGIDPGGRTFATVYDPVIKTTYQVGIEEDKEFDLRPIHDKIDETHWHLTNAQKRNQAKAIEDRKTQLKKQHLELKTIVKHIHTTLCSHLVKHYELVSLGKLSVSRIVKKEVGKRGLPRRAKRDLLCWQHYQFRQRLQNRSIGTSCEVIIQNEAYTSKTCGICGVINKQLGASETFTCNSCKYETNRDVNGARNILLKTLKMFPFANVA

SEQ ID NO: 4324 - protein, 325 aa, Saxidomus purpurata
MYKSAQTNQKKRDVILKDKDIVYLREGSFQVPKKYLRLLNAKDTKDSSILNKCITFLGDNFSRARNNGKERFMRLAKPVNKLPPIAHDVRISKRANGKFVLQIPCDSKYTRRSSGKNTDAMCGIDPGGRTFATVFDPTNVNAFQVGLKEDKQFVISKLHKKIDESHACLKNAEDKKHEQEKQNRITRLKKLHLELKTYVDDIHLKLSQFLVRNYKYVALGKIGVASIVRKDRPGHLSKKSNRDLLCWRHYAFRTRLEHRAKGTDCEVVVQEESYTSKTCGLCGIKKQNLGANEVFVCDSCHYQTHRDINGARNILLKSLKMFPFN

SEQ ID NO: 4325 - protein, 477 aa, Saxidomus purpurata
MKRQREKATLWDAAIVDTHETFWHWWQYIRRNDYPGDVKETVGFRELQKNVKRLKPDTETVKTTFSVGLRPTKSQKIVLNHMLKVSNQAYNYSNYLVREKRLKAKHFDLQKYVSKSNADTIPDEYRMTNDDWYFENKMSSIKATSCKHFCTMYKSAQTNQKKRDVILKDKDIVYLREGSFQVPKIYLRSLNAKDTKDSSILNKCITFLGDNFSRARNNGKERFLRLAKPVNKLPPIAHDVRISKRANGKFVLQIPCDPKYTRRSSSSQNTDAMCGIDPGGRTFATVFDPTNVNAFQVGLKEDKQFVISKLHKKIDESHACLKNAEDKKHEQEKQNRITQLKKLHLELKTYVDDIHLKLSQFLVRNYKYVALGKIGVASIVRKDRPGHLSKKSNRDLLCWRHYAFRTRLEHRAKGTDCEVVVQEESYTSKTCGLCGTKKQNLGANEVFVCDSCHYQTHRDINGARNILLKSLKMFPFH

SEQ ID NO: 4326 - protein, 662 aa, Chloropicon primus
MSLSSPTCRAAGSRAASLDTNACTVAMATSAGPHREREMAAIEENVDPTTLLNADGLIASLRFADESAGPRPTLAREGTRAERTRQPEELTLVRVVRGRGGVYLELVEGLKGLTHCIVFLRESIVQEGLGNKLAGQAATISSALLGKDLPKQVKAFRFVELGTASRSRCLKDRKVLTKALALAKEKGEPCALLVAALSRLSRRPQAYKDLDYLAERAGQASILACIPTSHAAALIGEEKKEELKKYMSKAASTSDGQAVYSASHCMLKSGATRCSVASGQHTSEELCLLVEHVEHVLRHKLENLEKPGEQKHGKPLLLVGIARTSPGTDVAKSTSIYVQRCLLLHVLSRGSTSEEAAVQEWVKKVCDEGKYAELCTRADRLTRELATLGTLLERCCKANIATVACLTEVDAVVTEERHVQEAVAQVLAGDEEYLLGKRFVEQRASDLVRAWKNQPTVRVLVAACSITEANYDIILREEHMEFLETYRQYCHVHSGYKENAEGGGVNVGSGRQKSENRKAKEVDCKAIDGLLEEEDANLSSLSCKISNEKSDLESFSSKAVSLVQDEFVVKAGGVLNEIRMLLTLRHYAFRTYLASKVLLHGSELAIVTEEYTSKTCGRCGHIKENLGGAEVYKCQECGFKCGRDANGSRNILLKHLWEPKNL

SEQ ID NO: 4327 - protein, 855 aa, Pseudozyma pruni
MSSITLTNIARDDLPRRTTAHGPDVYPFYDPNLANVYDRLVKPRLSLSLGSGPMSVCDPSEAALRHCWVDTRVTKFLPNQGQEKRWPFDTTIVIERDPNAFPTDLGGLPIKDLGDEAVSRLGGTVPSSDDRLVASTSSATGPIPSASWPVGSTLDTAPSSLHAPFSMHPTSSAPFPLGPVWLPASMPISTVSGTDPFASWSPPLPPQPHMHFGSAAPPQPLWPSISSSSVPFASVTQAPISFWPPPLGHRSNSYFGLAALPRLALPSDSLALAPGTSAPIASVPDTLPSASHADSDSLVPVPAISADDPWWSTSGPLDAMDVDEPVPSPPHTPMDVDEPTSTLREPQSSQPPPPPPPPPPPRAATGQQAAASVGKPDITNTRTLVYRLKPPTALKLLLRGYREALRVLQNEAIWWVNQAYTQNHPHLNEFGMYRLLGNNGSTFVKRHPFLKDCPSYARRSVIKEVIANRKAILTNHANLPANQRSRRMVPDMKPINIHKEQLKGWSVAFTGSASIEVRSDPLDSTKIAGLELRTPRSKIGRLNVSEYRSKVCLRGQRQRRFLLTDVCPLKGKRHTLPSHWSIKCRSDGRWYLHLCYELVDKQRFEADQAAAKQRAGRTVHTGDTRITVVDPGIRTPFTAGQMDGRVIEIGDEDDRRRLRRLRHRSDELQSKFNRLRRPNRRARRGNGKGKRGTRHAESQQERRRLQYERKTVLSKLANLIKEVHCRVAHWMIMSSDIIIMPRMEVLGMIRRRRSKLSRELKRELLCWGHAAFVNRLAVMCHDIQYKQRFPHRLGHPTTLLIQPEGYTSKTCAGCGHINDRLGALKWFRCPSPSCTYEADRDHNGAFNMAIKAIRG

SEQ ID NO: 4328 - protein, 599 aa, Pseudozyma pruni
MTSITLTNIPRSELLPDNNSRGAYNGFGHPALTGTWFDVRFNHYEIGPVQRWPFETTRILDHCDDEAPTDRGLLDPGDLGDEVESLIPSAPSNNRTANAASTTSPAVSTVNKPPLGDIRSRKFLLDVPADLRAVFRDWNAAYIKTFNEAARMANLATDFDNDNLSEYELYRLLVNKSSPLVVLNRELDLCPSVIRRGAVDDAVRARKALLSRFGARAPSVSLKPIDPSRPFCFNNASDAGFIRPQWRDPLDPSQGQYGPKLQFYPKILKQRGVSSVVDIRLRGQKARRWLVDRCERKEVRERVSGTKQWVPVERFCFPREWQLQLDRYGDFYAILQYRIPESKYVKEHTLHGPLLVRTLDPNVRTAFAVWSSDGTTIDIGNEHDRDRLKVLRLAMDRLQSEENRRQHTDSNTDCNSNSDSNTDSNTDSNTDNVLPFYWPSKIRRRFRLRRRRLAKQHRQLVDNLHQRLANYLATTSDVIVMPRMEVRSMIRRRGRSLHRSTKRQLMAWAHCAFLNRLIIKCHDVAHDHRYPHKAGRPTVILVQPEPYTSKTCPACGNLNQRLGSNKNFRCPSCAYHADRDHNGAFNMILRAIRSPDYVV

SEQ ID NO: 4329 - protein, 609 aa, Pseudozyma pruni
MTPSVMLSNLARTDLQRRGTYRGIDVYPFYDPKLERLYKQLRLPSKDNFVGHIKGDADPTAQTALAKSWIHTKVFNYAPHRRAYSWPFARTTVYDRDPETTPTDMGALDVEDLGRLVVQTFENADTAPTTPSTNIASITTSATVPKPKPNEKRARKFRLVVPADLRKLLHEWRASAIFTKNEAIRRVNQATDYDHPDLHKYRLAAELSKNDGDFVKNNADRNLHKCPHSIRQQVVSEAVSCRKAIITQHRRGLIKGPLPDTALCSEEKDQYRGFMLFFQGKAGRIVSETRTYQQLEVVDDSVKLSAVPHEELLPLKLRLLPNVMGRAAVDSVVEIRLQGQQQRQWLVDICNVKVQKSTGVSHRLPHLWGIQRDRYGDYYLVVNYRKADPPQAASLQAFEGPINIKAIDPGVRTAFTIYSSDGHIIEIGSKDDCKRLERLRLAAYELHEKIAAPDSGLSAAQRRRLRKRKARLLKKHRNLITDLRFQVVHYLATTSDVVVMPRMEVLSMIKRKGSVLNRKTKQALVSYARCTLLNELCLKAFDIVGDPRYNKTRPTIVLVQPEAYTSKTCAQCGLINEKLGSKKTFQCGGCGYSADVITMASSAPNHGVG

SEQ ID NO: 4330 - protein, 658 aa, Pseudozyma pruni
MNAVTLTNIPRQDMAVESRSRHVYPFWDAQLAAKYGQLNLPHKDRKQEADKPNHPALRNTWFDVKVFHYGKGLGTLQRWPFSLTKIEKADGIPTDKGLLDPEDLGDVLSVTPSLDSPLPPRPSGTGASAHDAALVKKKITDTRCRQFPLKNVPEDLRKLLWKWYTDGMVPAKNEAIRIVNSVTNEKLLPHARRLYKGICPRKCAFAVSQGQAYMECPSQVKRSAVLGAVSSRQAILTRFEKSKKKPKIGAIVPDPRKGFVLTFAADMGAILFEEQNKAKLARSNSTADTSGIRSCSDDGCKEGFAVPRLRFAPRTLRLAGVQSPLLDIDVRGQPNRQWLFDICDSKERPKKSRAETQDEAQEDEDKDEDNTDNMHDDVGCGAIERMLPREFAIQLDKYGDYHLLVFYKVKTTKEKTTETLKGEPLIGAEDPGFRVGKTLGSANGTVTEFGCEKASARLAALRARANGLHHQRTEKLVDEKAEEEKEKEKEKDEKNDEAAPFALSSKKRRQLRRKEMRTRKKHDNLVRDFHRRTANYMATTHDVLIKPRFEVHGMIKRGRSKLPSSVKEGLLGWAHCKGLDIQALKCHDVAHDARYDKTKPTVLLVQPEAYTSMTCAKCGHLNRKLGPSKIFKCPSPTCDYEADRDHNAAFNMIIKAMR

SEQ ID NO: 4331 - protein, 218 aa, Pseudozyma pruni
MDMRNEMVIVEKRERGNHVHKQHHPIPPPAPAPQPPPVDRAAPRPGRPPRSLPFALSAKKRRRLNRRARAARCQVHNLVKELHCRAAHYLALSLHVIVMPRMEVTQMIRRRGGRSRLPRSVKRRLTTYAPCRFLNRLLLKAKDISVDPRYPGKRPTVVIVQPEAYTSKTCGSCGTLNERLGSNRTFTCPACHYTADCNHNGAFNMLIKAIRPPASPRS

SEQ ID NO: 4332 - protein, 1112 aa, Sporisorium sorghi
MEGDKIIDMKLQLAPRCVTKAGGTTLDTLVKIHLCGQAQRRFLRDKCLPKPLARSTKYEIHHEWGIQLDCYGQWHLLFPFDIPASTLQAREHLFEGPITIKSADPSVSTPLSVWDSSTGTAMDVRCVEDGARLEELRRQDAKLQSRRSQRQSLPPSPFPAQPRLQHTHRQGHPPQPAQPPHPPQPVCPPHRPPHPPHEHPPLVPYALSSSERHKLLKRSKRLQKHIHNLVTDLHCRAANFLASSSDVIIMLRMEVRQMIRRHRRGCSLARSTRQRLLGWGRIAFINHLAVKCFDVSVDARYHHKSRPTVLLIQPKAYTSKTCGTCGELNHSLGSSRHFDCLHCCYVSDRDHNGAYNMLGSQMPHTIVSTPPPDTTGWQLAAWVALTTSHVQRDVSKESSRLGQQPGAVKENEAAAVLDAARIDTLLVFWPDKLVDLSSLVSALGNKTCPTLLVGRIVPGHSREAAVVVIGTLQALDIEAVSDAIASHRLSIVGSLATRNDADVTVDASAFAVRSSSSIWLSISEPRSHNELPKVASVRVDQPQTANGQVNTEAGYAHNAPCAIGLVSYSVPNSRMLQYFALESLRLAPVSGMKLVSTASALLVPDAQLSAGPRLTTNDFAPSTLENKFLQLLHLDPVLWRSFRSVRPGEGQLPRGTALRKSIEVINQLQALHEHLATFRETSSSTNAGNGVAGSSLHDTMAPKPSGLLSRIDRATTWIALAVQGALRHPLYTPKEPAVVIDGVAKRSSEAKAKSLRLTNVSASARQLDVRISQLVVAPRLASRLRYLRKQQKLPIDEIAAPYIGLWNAIWLIANDVILGHAASVLLLQNKALLAELARTLSERYLLDAVLWLLSWLENWPAGLKLNTELSLFFSDAYSSLTVAWHVQGLAHILPRLESVIVAVAFAGRWMGVTMVLCMVQDLVSMCTLHLTIFYTLSFRTLRGFVYVLSSLFDVFRGKKRNALRGGRLDDASYELDQLLLGTLLFTLVAFLFPTVYVYYLAFGLARFGLVAFEAGAVETCLGLLNHLPLFALMLRIKDPHRLPAGVWLQDVPGTADGAPALEVGRFRLRSRPLTVGDIFEGYGQHVGGLVEVPSMLLRCVFGRSLRPPSSSE

SEQ ID NO: 4333 - protein, 654 aa, Sporisorium sorghi
MIPVKLTNYPREDLLRRGKDRGPHVYPFRDPLLENKYSKLMLPATEHAVEGQMTHPALQNTWFDVKTTHFTANARGTIQRWPFGKTTVEQTLGHMPSDRGRLNLEDLGGVQEALEKAGENASSAQSSLPSSATSSAQDSLPPSTPSSAPSLAPALAPALAPALAPALAPALTPLPFPAVLAPEITNTRVREYKFVVSKDLRKVLREWAESYVITKNEAIRRVNSMDTVPSEYDLYKELVNNTSSFVAEQKAAKGIMLNKCPTQVRRTAVLEAVAARKSLLTRHKKGKKVPEIKPVKLSRDFVLTFPKTSGFVSFERNKPSDKWNNPRLCMTPQLLGSRGVSPYVDMRVSGQKNRQWLYDLLQTEDEGNLTERFPMRQEWRIKHDEKGDFYLIMAYRVKTTKPKAKTTLGDSSSSLVISVDPGVHTALTAYHSDGKVVEICNTDDAKRLADLRLAADKLQARRLLTKDQVEKKSDVDAEPQEQVEEKDNVDKAQGSTGAALALPAKQRRRLHSQELRIDKRHHNLVKDMHRRAANYFATSADVIVLPRMETSGMVKGKRLRKSTKRSLLGYAHCKLVDRLYVKAHDVQHDKRYNNKKLLLLVQPEAYTSKTCANCGHINDKLGSKKVFECPHPQCSYIADRDHNGAVNMLIKAMR

SEQ ID NO: 4334 - protein, 521 aa, Sporisorium sorghi
LRNLLWKWYVNGMVPAKNEAIRIVNDITSQKHPKLNAVKLYPEISNETCAFSLQNEGYADTPSAVRRAAVLEAVTSRKAILTTHAKSSNKSQSKSRRKDKSQDQPQDRPQDRPPPKIAPIVPDRKKGFVLTFTKKYGFIQFQQQTQKAARSKSQSTHAQGARCETKGFKTPRLHFAQRLLKEAKIQSSLIDIDARGQQSREWLLNICEGGQWQSNNSKGSVANAEEQADDQHDEQDDWVFERQIPREFSIQLDRYGRYYLIVKFKVDTKEEAKVQVRGSDILVRGGDPGVRTAQTWYSSDGTVIEFGSKKDSERLASLRRKVDRWKSQRMKKQAVDGKEAGEDVEMGDGSVSVDVQGGSEVGKDGDAKDGDAKDAPFALSSKRRRQLRRKEVRALKKHSNLVKDMHRRTATYLAQTSDVLVTPRMEVSGMLRRGSVLKPSVKRSLLAWSHCKFINVLALRSEAEGKVLLVQPEAYTSKTCANCGNQNEKLGSSKTFKCPTCSYTADRDHNAAVNMIIKAMR

SEQ ID NO: 4335 - protein, 461 aa, Sporisorium sorghi
MIPVILTNIARDDLPTSKSRSPDVYPFFDSQLSHKIKNEAIRLVNQADSHTHPNLDVYRMAVLDVITARKSLITRHINTQRRRPIPDISLCSEKQDRERGFAVYFNNFSGKVIVSRESPDGPILGLTLDLMPHLVNKLCKDTTKSSSKAEIRHRGKQGRERLIAICREKTRFLYQLPREFSIQVDSAGHWYLLAAYHLTDPHLFAAKAKERKERKRIDFQGPINVKAADPGARTFLAVYSSDGQAIDISGDSDRQRLHLLRTQADQVQEKESKKKKRTRRAGTRRRRRRRRRPSKPPKRRRQRQRLKHELGSAERRPLRKQHRRLHAEMRNLVTEVHARTAHYLALSSDVIIMPRMEVAKMVRSRTLSKRTKRELLGWSHLAFLERLAIKCHDIEFDTRYVHKAETTLLVQPEGYTSKTCSNCGNLHQSLGSNKRFLCPSCPYQADRDHNGAFNMVIKAIR

SEQ ID NO: 4336 - protein, 1451 aa, Coffea canephora
MKSVLIRGAAASSACSKPLSGCSPALKPPPWAESSPGFKGLKVCVIEYSSTIFGYEDQVGVHFKNAVSSCSDSLDLVHRPSILKAMKQTKTLKVRVRDKHIAQLNRMARSVNFCWNYLNELSSRAIRERGLFLSAYDLHPYTKGAGKELGLHSQTLQCIAAEYVTRRKQFRKARLNWRKSRGVRRSLGWIPVNTGAAKWKSGQVFHNGSYFKVWDSYGLSQYKLRSASFNEDARGRWYFNVVVEIEVDPPAGQDKIGIDLGLKDTATCSDEKRTKNIHAKIANRRKDALHKFSRQLVNRAGEIYVGNVKSSSLAKTKMAKSVLDAGWAMLKTMLEYKCDSAGIVFKEVNESYTTQACSSCGCISVSSPKGRSGLRIREWTCSECGVTHDRDVNAAKNILAVGHGRPEVGIPVLRAGRMSNSTPAVPEHEAQRLLTLKRYTLGDLSADQEFDRITRLAAAYCETPIALITLVDASHVWVKSGVGEYSPTALRQLSLCGEAILEPKLFEVSDARLDARLHKFPMVSEAPHVVFYAGMPLVADNGNILGTLCVMDHKPRQLSPTQRELLQQLASSTMLQFEHYLSQRAYQAIGNAAIGLWEMDVATRTTHWNDVVDALYQTNARQANTFEARMQAYTPEDRARLTQAIDTAVTQGTPFNDIFEMQPPSGEPLWVRITGNPLAVNGQVVQIIGTMLDVTPRKKVETQLLRQQALEQAIMRAQASFIDEQGNAKALNPLLDDLLTLTGSEYGFIGEVLYHPDKTPYLVTHAITDISWDEPSRQFYAQHAPSGMVFSNLDTLFGHVMRHEEVVIANEPAHDPRRGGLPPGHPTLDAFLGAPIHFHGRCIAMIGLANRPGGYHPDLVEYLAPLLGSIGQFINTLRHYRQQQQDQQAIARLSLVARNTSNGVVITDARGNIEWINDGFTRLSGYTFAEAVGKKPGQLVQGKATDRATVLRIAHALRHRQHFEEELLNYRKDGTPYWVHISCNPLPANEQTGGGFIAIQSDITDTKLHEEALYKAANIDELTRLPNQRLARTQLEALVRQDTPLAVAILNIDDFKRLNDLFGYATGNSILRRVAKRLEALVSPFKAQGITARLSGDEFVLAGPTQRLTPSTIQHAIQQPLHVNGQKLKLTACLGMTTYPNDNVDPDALFRHAYQALYQAKTQGIAQCVRYSTDEEHLVKLRQQERSAIQHGLANNEFRLYYQPQVDLKSHTVVGAEALIRWIHPQQGLRNPAEFLPLLEGSELEFHLGEWVIEAALKQLQSWLAMGIELQVSVNISPQHLLHPGFLPQLEQLLLYYPQVPSRLLAIEILESATLDDMQAALHVLEECQRLGIEIALDDFGTGYSSLAYFRRLPVQLIKVDRDFVRDMLESEDDKAIVESIIFMARKFSRPVLAEGVETMAHAQALLAMGCHLAQGYGIARPMPADALPGWLETWQAEDLHYLNRTTPSGR

SEQ ID NO: 4337 - protein, 670 aa, Absidia glauca
MKNAIVETFEARCIRYLEHCLRQEKDLVLENNHIKKLALNLYDRLSGATTPYWPTSVVKSNDLETILNRIVQNEDLSPSPITAKSLTSNICDYTGVLYRILKKYEALNVSSASISSEPTVDDLAENVSPWWAYGQLKDLDDFTSLGKRQRQKVSRQLRSQINNPVGPTPTFTIPLPEELRAVLSTLVVDTRKLIANSTRLKSGDQVPLNDCFAPRKSSQNAPHRLFQLLPMRSFRMPFITLDIHTLVSLYNNSITRTNDTEWAGVSNKQGIHRIREDSQTFSRVFNLSKVRLGRSDEAFDDIEDHPPETRRRPLFNNMVLTDGFTVNILLTRATSSTKLLDLELEDIAKPHVAQYFDLWGADPGLKDIFVATDGQQQYRKFSAAEYRCKTGQTRRKAERDRLHRQANITTIESAIPTTKISSSSSLIAAIRYILEHLSPLLALYGDVMWAQHRLWDYSGAQKLDHELVQVFLNGGRKYDPSTAPHPTMQHRTSAHPTRFRQAPSTRKTRIPLIGMGDGSFGMTMRGIKPGLATHFKKVLKHAELQGKLLVVSVDEAYTSKVCSRCQVKEMENMEIGTDSRLHSVLTCKGCNTVWNRDVNAANNIFSLAARAIDGLPRPAIFCRPPTTSVAATTTTXXXXTLQPTVRITIPYDQKCHFLEHGCAFECSDGM

SEQ ID NO: 4338 - protein, 536 aa, Tetradesmus obliquus
MRRGSLLALLHYTRLLGDGQDRAADAITLWTDSGWRQVMTIGLPTFSIRKLEDPEMCVTYEMYKHMFPADDPDLSHMPTGAANTLTHAATQLRTAFTNNLWVPLVPRLKRLCRAWRRKRKQEQVARSDDPSIIDLVRAIETGADYAMEKKMHAAAVEFVTEVRRRLGLPDAGAKLTESYAKRNQQQMLLFLAWLQRRVEALGGKGVRLCPVFSVRRQHVQLDCTTLLHMLSGMRLVPEHLMVKQGEATDWEGVLDLVAGVFEPPCPAKQKGKLQWWGSLSTDGVAASFVYADTRPVSKKGTKTAAAAAAVTSSSRSKGITTATTPALPPPHDLAVVGIDPGRCTIVHAATQVQGTCTLERTLPRKRYRLESGLAQAQAKERRWDTAMIGGAWKQMNQQGGALRSSSLQQLTQHIAAYNSVAEEWWTSAMQRKRAKLRFRTYGGCKRCLDRFFSGLERDVSAAEPNKRLAIAYGAATFSPSGTGKLATPTTAAYRAALRLRSSGAIVEKQNECRTSSSVVTVMEIPFAIQSGYGAGD

SEQ ID NO: 4339 - protein, 896 aa, Rhizomucor pusillus
MFAQNFLSRECSRKNAPAVYKEVHKQLFSSLSDEQKPNPSYSGTFVKRHKTYNPLKVYQRLLDDLEKGKTTVSEPIEPNDQEEEEQQALDGNDGDLAGDNKAIRTVTASLQNIVHPDFEPSVLQEAFRKEQEIVSKHMKFLSRFIEAFITKVTTGEISKISGYPDSTTKAVDIDFRDFATNFEFDKEAETKLLVAPVQEDLQKFHQSKVYTVEHLSNIMSGCVGRSINEKEESETFKQIRQLLLQAVNGDKQDASFRHSPTIADALLHSCGLPWHYEDWKNFTQAPRKSGGKEGRRTAIHKSGGKEKVKSLMKQLDSALLSGQQNWGIQSLERLKSAISQPREQTRSNVRTEDAYESNVFDLSEEEDEDNIEKQEITPIAQRGPNTDRQPEDVKRVLYRGTEATEDQLKEVARIINFLRPFVHRRDDKNELPQINPQQSPWMMFPNVEKDHSLHLGAAGLYNIMSKTHILRYDGTPITDIETATWHPKDIFWNFFDVDKIQISLQEQKLQTMWRLCYIDKYRIRVLGYKIVRANRKRKWKREKDAAQTKSILTDEERDRIEQEWKTEKERADAGXKSRTAEKQHGWNRTLYSQLKEARGKADSLYLEIQEEEQTIALKQKKLYHLNRKLTRCPSTCSNNLSGEGLVQELLYEHLQGQRNVGITGIDPGRVTTATISTKRIRSLFEDINRFEALQEDTDQIADIDTDVERCPKPVELKTGLIENATFRTVHRALRDQGQETNVNWKPVNSRVKGHACSGSLTKLEQTLKAPEPDKLYTIDKYNTTKTCGYCFKKIQIHKYRRDGIFVRVKGAVSCPNPRCPSRIVRHTTCSRDAVAASNIALSSISRALSDDNQPLPCFRRGQSKDMRFSLTQKFQLDCGRTRLVTDRSFSRGKDLD

SEQ ID NO: 4340 - protein, 228 aa, Rhizomucor pusillus
MAKFPARTSRLPIQNEFAVRSTLQEDKNKLDMKQKKWAKAKFTPNSEGKLPLVVFGNGMFGKENIPMKGHRSGLIGVLYRMLKRREARGELVVVIIDEYLTSQVIGDCKIPLKHLLTPCQYIRFAIIAKWGSLKNVATADGVRYNSLQVCKNCDILWNRDTNACKNMFHIATSIWSANNRPGPFVRSKQQITTTNAEYLLANPASIQIRFQRDAKLMLQTQTVSVVAG

SEQ ID NO: 4341 - protein, 515 aa, Rhizomucor pusillus
MIITGSYPSRETGNAGEDDVTSFNVARLHGATNKGASKACKKSFFTPTPLDGMEKDDLMTCIETWEERISALQERSKELNMRKHTSIKTLSKAEQEGAKRADLKSLQLAKADAEYEALKNQLALKDFRAAVNHTKWMMKNQDRKDGSGKEQERMARPALEHHTYEARSVGSIKTTKGGSKIVQEACIQWDRLRYRKTSVTVPISLQQYRHHIELYKRFQPLSTKEEDMRMPSTISSKHMYNKAMVYKNAKYREKRKARNPEVREAEENVANNNIHSAKSVEDVSNWQKEASREKAYVKEACGTGKKSIPIMFIGDQGLGTNTRLNGHVKGVATKIRKEHHLHTVVAMTSEYRTSQTCDWCLGPVVGPKATILKDGKKKKRSVHGASLCMNTKCPLYRAGRAVQGRDYMAAICIALNGISRVIDDIHLSPFTRHSAALHMLNTSNSPDIIGDNWTSQLCIFQRGKKIEGYFYINSCTMRPGASFCAGSAYGLARISQALSRQISVDYSGSTLIRFL

SEQ ID NO: 4342 - protein, 443 aa, Rhizomucor pusillus
MLLNLESDFPLQNWLETDFFAEVWLSLTLRTVKSSRTDGTRRYRGLIDRHIKNYLKHSGFNRKALTNSQQIAHYEGSRIFTAYLNSIKNCFGNRLRYVINLLLKVKDNRARITKEMTEQGKSSQKIKEAIYKQVTTPAHDVKQALLPSTPGNHALAYVMMAKFCEDHEIKTFKCMPLRTSWIPAHMQIDTKILATQTLKKPNNIDFDSGLWKQVVNFQSKPLQNQGADKSMAFKGTIFTDGFGVSILKQNFDSGFGLKPKKMKADTKSDFTYIHDLDKTTLGNIKPRTLFIDPGRRDLLYCMHQDSTSEALLTYRYTRNTKAIDTKATQYKKLRQRIKTNEVKGCEAKLSKHPAATVYIPKFLLYMKTRCERKPWDQIVEDPVLIIGNWSARSLTMNKYHEPARGIGLLRMLRNKRFQGYLIDEFKHRVSVLIARNPWRHSKW

SEQ ID NO: 4343 - protein, 956 aa, Rhizomucor pusillus
MLSRYHTKQAPTTGEIPFPRLRDQSTTSKKNVIQAVEIDQDVLIANLEQVFDKIVRGSIRKLKNSPSELPGDESERLKTTNKIEKEVTKKKAKFLALKQLPAGPYGTSRKKLIKLSPSRLDRWKSFLNSNFDRINKDVEIQWSSIDDEKEDKKNTEAENNDDXDGSNXGITSVPXSSVLRPGLPEDYIEXFEETLGSTQELISDDIANLSAVIRATMLEFVAKNGTQFGLTQIIPDHALRDTSMLEQDKYISLNTSLVGAADTVLFDQQHIERLHSIYSGKMAATVQQRALGSIDCDYYIPDFYYLPSAPAGLSQTTNKAVHQYCTNLEQMKAKEKQERKIKVDSAAIRNFQRNRLREEKKYLQNENRIVQAKDSDEEEKWSSRRYKCQQRIYAINENWQKRLKNQAQDRKNLQSDTNEADNDDDTIRIVSRLLRDGIEEGSIVEILEECNEEDSPDKDTPGIDEEQDDQKHRNDVIKQHISETCSNDFELQSQEIQAVKTIVNLLRPFVRESNGKQHRSIADALPFVVFANTVLAICGYQEFTTQISPLVSAGRIQSLTLDATSIYEMFISNAGRFNLCTYSGEEITNIRKARENKELMMGAFLDIDKMDKICNESGLIFQNRALLTSFGVIRLLDKRKHEKQACATYKTQISQGQDNDNIDIEALKTKIAELEAAYKLQQKERKRNIKAFAALDDTELDGNMAPDTTAESPDTNDGGNFIAYVATSRFNCITAAQITEKSLCNKHTRLRQKRNRKPSCSRCWKANRREINTEGNGRKRCCHCTRSCMRVERSFEVFYQSSRAKKEKRSQEIATRLTYSKIAAEERSIIKSNTGKQQRAAVMCIGNQGTCVDSRIKGHARRDGKKLRRQHSQYAVVALTDEFRSSRTCPFCFGTVIRPKCKKKIKAIAGYTSLQGYTMQPFNRYAAASKLPTKNTALDPPGGAATAFADVQDDQH

SEQ ID NO: 4344 - protein, 477 aa, Rhizomucor pusillus
MYEMFASNNGCFDIYTSKDEKITNIRKARENKEVMIGSFLDIDKIKQIYEESDLQFQNRAILTSFGVVRLLGRKKHANQIPTSVDRTAGQQETKDDIFSIDLEVLNEEILSKEAVYKMQQKERKEAIAVCEHATVDMQQNDIRKFQELKELRLKRAWAITAAEETALELKDMRTIRGTDYGLQTMSTTVPMTADRMNYHLSLYNTFDMLSIADDEIPIDTRTDDTGTYVEIPKSICITAPQLNEKSLSNQHSRLRNRRKARNTAVQNAEKQSSEYSMKTASAAEDVSVAHRTDSEVFLSVTSGEKEKRNQELATKIAYSQVAAEERRAIKNDACDDKAIPVMSIGNQGTGIGSRLKGHTRRGGKKLLKEHCRYAVIATTDEFRSSKTCPFCFGPIIRQKRRLRIKDQYKMVTVNGSSICMNPDSAVCIAIAGYTNMQGYFLHCFHRYAASAMLLQKQRTHLHPSGDAGKASVEEQID

SEQ ID NO: 4345 - protein, 372 aa, Rhizomucor pusillus
MKDIKTFIEETSTELKNGTFRPLKYTNPRGARRFTLLPLYNFQARHVSMDLQAFSKLLLDSGLRIKKDGQVTQETAKQGNQIITDGYDLIFVFKKPKKEYQPQVPDSIGKSIDNPDTIVWSVDPGVTDIITSVDGVVDEPHRIRQTSANECYHLCGYNRTRIRETIESIEYRMKHHYNICEFYHREFRYNKLKFKSYVNKQKGLAEIAKRLLGGSDKYRPDREVTSHSLDFTRQNQGCHAESPWDTATEKEKPVVVAFGDGSFSGSMKGKITAPTKSVFHALKQYALQRKAPTFILKTDEYLSSQICPKCHTRSLQNLQDKTNSKIHAVLRCKTCSTVWNRDVVTALNIRRILIHMARSKSEKPAEFKRESK

SEQ ID NO: 4346 - protein, 327 aa, Rhizomucor pusillus
MHTFDKHERQKRATYLLISDKTGSGRSASILLPFLLVASGAFRAWCDGRIDGARLQAKKSLAFKKAQRLNEVLNRSFNALKDRLREKYARQWVSFTPVIKHAIIQQLDARRDTRCYTRDFANEDATIFIHEAPFEAYPETVPMDHKLANALYRRIKQRNRGCDSTNADIPTRVDEYLSSKMCCYCTKQGRKQRVDFLQRTPVVSEQDAARLDDGHEKVFRVVTCQNCNLVFHRDGNASDNLTSITRYMLRFQERPRWFIRPSSRQRTASDRGTTVISGSRGRPGEREIMASSGAPRRKRIASETETMVEPSWSPQQETPDSSSAPVS

SEQ ID NO: 4347 - protein, 237 aa, Rhizomucor pusillus
MTLSIQSAVDKAATRILKKAGVCSNAPTEQRDREGHRRQVMSEQAKQQALERQEERKQRRRKTAEKRENHVLIAIGKDGVLSSHRKGAVSPMDTRLASALIKCCKAEGHIVTAVDEYNTSKVCPRCITDRRTSYLQYLRCPPAASRHTDHATLDKDGNEEINVSPSAMCAKCIFHRDGVAAQSQALISASMLEHGQCRKPFIRPSRQLKPNTHPRQTCSILNLNSIFESQLIVLGVE

SEQ ID NO: 4348 - protein, 245 aa, Rhizomucor pusillus
GFADECHRIRSVSAKEYYDMCGFNKAAESRRNFGEHNPQTKKIINSIPSAKTASLERFKESAEYRIAKHDAILLYKEAEAFTEMAKCLTTGSNKYSPDNVAKANEEGSTKKKWRPLAPEDKTDETSIIIAFGNGAFASTMKGKRAVPTKEFRKASKQSPQLRNLGRLHFHINLPTKYTPAFSRKRKYCWCVNEKSQMTIHAVLSCNTCRTVWNRDHMAAMNIRGVFIHMQHNKNERPLAFKISSL

SEQ ID NO: 4349 - protein, 353 aa, Rhizomucor pusillus
SKTHILRYDGTPITDIKTATWHPKDVFWNFFDVDKIQILLQEQKRQPMWRLCYIDKYRIRVIGYKIVRANRKRKQKREKDAAQTKSVLTDEERDRIEQEMEELSSVLKKKKATAKMTLYLAPTFYLVKVRYKNSSMSTYKDNGTSELWGIDPGGVTTAMISPRSMRSLLEDINRFEALQEDTDQIADIDTDAERPRIRSGTRKEAVSKEPEKNSVIHFLGNWKPVNSRVKGRTCSGSLTKLEQTPKAPEPDKLYTIGEYNTTKTCGYCFKKIQIHKYRRDVRHTTCSRDAAAASNIALSGISRALSDDNQPLPCFRRGRSKDMRLSLTQKFQLDCGRTRLVTDRSLSRGKNLA

SEQ ID NO: 4350 - protein, 337 aa, Rhizomucor pusillus
MKDIKTFIEETSTELKNGTFRPLKYTNPRGARRFTLLPLYNFQARHVSMDLQAFSKLLLDSGLRIKKDGQVTQETAKQGNQIITDGYDLIFVFKKPKKEYQPQVPDSIGKSIDNPDTIVWSVDPGVTDIITSVDGVVDEPHRIRQTSANECYHLCGYNRTRIRETIESIEYRMKHHYNICEFYHREFRYNKLKFKSYVNKQKGLAEIAKRLLGGSDKYRPDREVTSNSLDITRQNQGWHAENPCDTVTEKEKPVVVVGDGSFSGSMKGKITAPTKSVFHALKQYARQGKKSSKPAGQDKFEDPRCTKVQNLQYGLESWCYGCSQYPSYSYTHGKKQE

SEQ ID NO: 4351 - protein, 341 aa, Rhizomucor pusillus
MGTKTATKLFALTPRPNFQWRFITINEKALRALTGIRSEHAFGEIFDLTKYRFLTNNDAMFTNQISTDGYAVHFQLVRASKKESIDLKLEAFSMSEMEEYFSVCSIDPGRKHVFTASYGYGEDEHETRRVSRKEYSAFIGSKNRTRALQKIKKANGIEKLNQDFRLARLPPIPCKPISAVRSTLLEENRPHKEKKWQRVKGVSTAKDKIPLIAIGDGMFGKDGVKIEGHASGIVGILYRMLKRREARGEAVIVTIDEYRTSQVCHSCLARSLRNVTTEDNISHHGILDCQNCGILWNRDVNASNNMYYIASRVWQGLARPEPFVRPTSNQPTTANVGPERV

SEQ ID NO: 4352 - protein, 730 aa, Rhizomucor pusillus
MATATAMQQRAFGSIDADFFNESFYYLPPAQAGVSQTINHAIHQYCKNLENMWADKLFSRSAEYVVRILLRLHWPPKKTSALQRLGFQKSKREKRVQGSVKISAIRNLQRNKLYEENKYLRKTESRIMQAGDEHEEARWFTRRYKCQRRIHAINEVWQKRLDRKPQDAIVQFAAGDSANHGWDERVSELLKHGLEEEEIIEILEQHEEDSTEEEEHTEEVISDQPEPSRKRLNRLKGICKSLLFSTTMVNEITEQDVTSACYDDLELSSKETQIIAFIANLLRPFLQASNGKKNRSIADTLPFVLFANTLLRTCRYPEFTAQISPTISPAKIQSLTLPTIDVSISIPPRMKKITNIRKTRENKEVMIGSSLDIDKIKRICEESGLHFQNRAILTSFGITSVDRTAGQQETKDDIFNMDLEVLNEETLSKEAVYKMQKKERKEAIAVCEHATLDMQQNDIQKFQELKELRLKRTWAIIAAHDPTKKKMVPTLRNFACESSPANITISTLEKEAYEARKPIVYSRTDYGLQMMSTTVPMTADRLNYHSSLYNRFDVLSIADDEIPIDTHTDDTGTYMEIPKSICITAPQLNKKPLSNQHSRLRNRRKTRKMAVQNAKTIKLRANQDGFSGLFISHLGRKKEKRNQELATKIAYSQVAAQERRAIKNDAGDDKAIPVMFIGNQGAGIESRLKGHTRRGGKKLLKDHCRHAAVATTDEFRSSKPCPFCFPSKKA

SEQ ID NO: 4353 - protein, 442 aa, Rhizomucor pusillus
MSRDIATYCCQEMATVYTNNIVENFQPRAVVYIQHKLDSFVPVRDVIKRKANNDYIYEWIAGGEPAELDIFAEAPLELILVIQEMKVLSMPLAPRPWTTKSMSATPGAFVPVLYAILQEYEREHVAAEYSLKPTSTLPKLFALTPIPKSNDVLYLSQEPSENPPFNLESMLSLANKWMTAYGCCEEQHEMRRVSRAEYSAMIGAKARNKRLHAQKKENGIEAIESGFTAKTTNIQRYNLYVQYLLVHETSLRQFYSQYHAHIRFPNLKGRNRAREELANIVINGGKKYNRKKRKKRAANQKKRTNYRKKRKKYREQRRRSTGSSPINSDQYVPQRTKDKMPLVFFGDGCLARIATESKAMKAVWLICHTCMSKSLQKLKTEDGISHHGILDCQTCGMLWNRDTNASKNMYFIAKNIWESSGRPEVFCRPNQSITANVEPERV

SEQ ID NO: 4354 - protein, 505 aa, Rhizomucor pusillus
MVITGSYPSREDGKCRERRFGNFFDGAKIHELCGTHGLQFEHCIDVTSFNVARLHGATKKGAPKACKKSFFTPTPLDGMEKDDLMTCIGTWEKRISALQERNKELNMRKHASIRTLSKAKQEGAKRADLKSLQLAKADAEYEALKNQLAFKDFRTAVYHAKWMMKNQDRKDGSGKEQSDLWDLSRLQKEAAESSRKLAFSGTDCGIVKTSVTVPISLQQYRHHIELYNRFQPLSTKEEDDDDDSYGNDELTSQRCNDLLTLPKPSTISSKHVYNKLMVYKNAKYREKRKARNPEVREAEENVANNNIHNAKSVEDVSNWQKVRKPSKMEPRAGPEKEYSQEASRERAYVKEACGTGKKSIPIMFIGDQGLGTNARLKGHVKVVASKIRKEHHLHTVVAMTSEYRTSQTCGWCLGPVVRPRATILKDGKEKRRSVHGASLCMNTKCPLYRAGRVIDGIHLSAFTRHPAALHMLNTSNSPDIIDNDAQEDSVEGTDIQSSLDGEVRK

SEQ ID NO: 4355 - protein, 387 aa, Rhizomucor pusillus
MRNVVIRVMLFVDIYIVQHAHSSIPTYVFSQQFFYSMAQPVLGQEITNDNPNLLDDLLDSWNSVKTQYPALIYPAMLKDMASKIANDYLYEILAGGNPVMLQYLLPCSIEIGNAIQEMWMELVPYMPRPCTTDEMAAKHGNFIPALHYILQQYHDEHQETPHIQELPRLISLVPLPSRNWRLIDINAETLAGLLKMPVPRIYNQRLTVFQTVFNLDKHRFFKLPSQPISAIRSTLDMEREQPPAKGKKWRKARVNCDNNGKMTLIVFGSGMFGKKDGVPLKGHQSGVVGILCRELKKREANGEVAVVKIDEYLTSQVRSNWQILCTMGSKSAKAVGPYGTETPMHPKICSTLRSAFGQVMGGVHLSSERISPLRMWDPNGFGSLRYR

SEQ ID NO: 4356 - protein, 232 aa, Rhizomucor pusillus
MEERNTTLRRENTGGETVENGKSKDEGESYLNENGESCRNKVIRRTNISEQMAKFPARTSRLPIQNESAVRSTLQEDKNKPDMKQKKWAKAKFTPNSEGKLPLVVFGNGMFGKDNVSMKGHWSGLVGVIYRMLKRREAREELVVVIIDEYLTSQICHNCQGRSLKNVSTADGVRHHSLQVCKNCGILWNRDTNACKNMFHIATSIWSGNGRPGPFVRLKQQITATNAGPGWV

SEQ ID NO: 4357 - protein, 311 aa, Rhizomucor pusillus
MVTTNGFQLSLXFARPAKSPXMELXLSDFKEEEIENYFMPCALDPGRRDIFQAAYGAQNTEHEIRRTSTREYYQWAGSPKRIENLKRTRKRNGIEEIESKFPSAKNADITRYSEYVRYLFLHLETLFTFYCFHNDAERRFRAYQGKQRAQEELVNVIINGGKKYDSAKRKHRMRNRRERKKNKVIRRTNISEQMAKFLARTSRLPIQNESAVRSTLQEDKKKPDMKQKKWAKAKFTPNSEGKLPLVVFGNGMFGKDNVPMKGHRSGLVGVLYRMLKRREARGELVVVIIDLPQLPREELEKCHNCRRRASP

SEQ ID NO: 4358 - protein, 601 aa, Rhizomucor pusillus
MKNATELNRNGRVKLCSEEEQSYSSQFKTQLKEARGKVDSLCLEIQEEEGTIALKQNKLYHLNRKLKGQDAPLPCSNNLSGEGLVQELLYEHLQGQRNVGITDINRFEALQEDTDQIVEIDTGVERCPKPVELKTGLIENASFRKVHRALRDQGQETNVKQARTREFLEKSFYQKFGSGIRKEAVSKKPEKKISVIHFLGSWKPVNSRVKGHACSGSLKKLEQTLKAPEPDKLYTIDEYNTTKTCGYCFKKIQIHKYRRDVRLTTCSRDAAAASNIALSGISRALSDDNQPLPCFRRGRTCCQFAPRWGDREANMAFVDSLLKRHGYGNGNYKFVQANVTVLVHRIERGQIDLLVLPEMAFTGYVFNSLDEIMPFLEDKDSGPSVQWAKKQAQQLECFVVVGYPEIEHKDKYYNSLCCVNPQGQVVATYRKTFLYKTDENWAAEGPGFQSQLIPGLGKVHPVLNFHSRKIVLEECFTWQVGFGICMDINPYRFEADFEAFEFANFHAREQSEIIICSMAWIRGQNVMDTIGYWAARVWPLREHCHLHSIPHMYFIACNRTGTERGVTFAGGSSILDLCGPKIRLLNYMDEDDEGIMIFDTK

SEQ ID NO: 4359 - protein, 731 aa, Pharnaceum exiguum
MVAAVPSSSSSPSCKRCGGTDHSRASSAKCAQRVLPQKRRFTVTSNDDANVNVTTYTVQVGFGKFCRDRGLRELIAADVFEVSALAVEASVYVHYHYTKLLHENGDSDIFTTTKFTQNHLLDFYYHLQGKRQRKERVPLDEEYFAMREKHGLQRIYDGKLRTFLIQSIAVQHETAMKNCVCVHLYDRVVRYLYLKHERKTAKWVWKCRVYEELFSRDRQTVRSLEIIEMLESFGLPADYRGFLDSENDWWRLVPFSHRLATWFERNGSRSFSVFPVFRPGPKHLRYNARALHELLRSVKPSECTSDIYEFMNTTPAYWWRYFDLSGKRYGQLDTKTNAIAAYRDRTKFGMSFTTNGAYCCVAMERFVPKNNDSVGLKSKRSKRKQTENNDLSVDLSKFSGFLGLDPGVVNYVGACYLDNGNVDRKRNYTLKTAKFKQSECKERVIKRRREKLIGRYERELFRCRKESEKMTSKCCSEYADTVAYTAYRLRHHEQSHLRYSRRKLVKLAWFGKMCKRSAEDSLVQRLLDMNTDKTNVLVCFGDGSLRDGVSYGSNRKPAVCSLRRAFHRRRDRCAVADVDEYMTTQCCSRCTGRMAMPPKHDKEQQQQQNTGDEMTIGRRRRHDHRFQFCQKCGITWNRDVNAARNIAMVARRLTKSVVPDYAYDSAMSPIKAEQQSDGDADHESSTMDSLETLVPRLRQQKPRYYHLKHRIEKRSVLDYVKFLMNLIGNTA

SEQ ID NO: 4360 - protein, 335 aa, Odontarrhena argentea
MLAERKEAYEKHKDDKDQLKKQKLPTPAKYKAEFEWLKEVDSLALANAQLNLQTAYKNFFCGQNDFPTFKSKKDRKSYTTNVVNGNIMLLNGHIKLPKLKMVRIKQHREIPQGHIIKSCTISMTPTGKYYVSILTEYEKEIVQKEVETVVGLDFAMDQLYVSSEDERANYPKFYREILDRLAKAQRVLSRRTKGSGRWNKQRIRVAKLHEKVANQRKNFLHHKSKELATHFDVVAIEDLNMKGISQALHFGKSVADNAWGMFTSFLAYKLNEQGKQLVKIDKWFPSTKTCSSCGNVKNMSLSERVYSCICGVNLDRDYNAAINIKNEAIRLLALA

SEQ ID NO: 4361 - protein, 445 aa, Ormyrus nitidulus
MRDYAEGKDPLAIRVDFTKYFYGLRDKPPKARGKRSDSRRNETFDANEYQLDTNYAALRRECGLSKFPDSRYKQNQIQFAITGFSTAFHNNLWMHAYRRLRRFLDGKIKTENLDISRSVVYIFLQKCFLKEKKPLAWENEHESRLAQFIRQDLSYDALEGLYDIRDKGKYGKYFRLFYNLQRWNERQGLRNFSLVPQLRHGRHHTTLDTRAMGDILARLKLAAKKFGKDDWSGVLKFGDLERGKKFHRSIQTDGVALSLAMEKPKMMEGKKKINRVKCETLLEKIRAQSHAYEKIIGLDPGLRLMMDGVAKRRDELDTRQGRLIKLSSAHFRHLTGENQRRQKLERWTGDSKVETHSESPMSADYEAYTRRLLGEFEAKQAKFEERRVARLKFDKYRRTEQAAHKLAQKIVEKDEGKALIIVGSSKIAANSPIRSYVRVAQSRLL

SEQ ID NO: 4362 - protein, 336 aa, Arapaima gigas
LLNKQSRAVNYVWHFCNDTQKHAPKWNKRWPTGFDLNVPTTGSSKELGIHSGTVNATCEQYAKSRSQHRRPWLRYRSRKSLGWVPLKGRDLKREGDAFRFAGNTFRVFNSRPLPEGKIKDGTSFAQDARGNWFLNIVIEMPDVHARPIRSGVGIDLGLKDFATLSTGEKLPNDRFGRCAAEKLAKAQRARKHKRHIAKLRAKVANARTDFQHKLALDLVRRFDYIVVGNVSAAKLARTRMARSVYDASWSSFRNKLRYKAIAHGVTFEEVDESGSTQSCSACGSKDSSTRPKGIAGLRIREWACSDCGVEHDRDTNAALNILRCGRASPGVGINCL

SEQ ID NO: 4363 - protein, 353 aa, Arapaima gigas
MAGMILVYRYRVKSLNGLLNKQSHAVNYVWNFCNDTQKHALKWRKKWPTGFDLNVLTTGSSKELGIHSGTVNATCEQYAKSRSQHRRPYLRYRGKKSLGWVPLKGRDLKREGDAFRFAGNTFRVFNSRALPEGKIKDGTNFAQDARGNWFLNIVVDMPDVQARPIRSGVGIDLGLKDFVTLSTGEKLPNDRFGRRAAEKLAKAQRARKHKRHIAKLHAKVANARADFQNKLALDLVRRFDYIAVGNVSAAKLARTRMANSVYDASWSSFRNKLRYKAIAHGATFEEVDESGSTQSCSACGSKDSTTRPKGIAGLRIREWACSDCGVLHDRDTNAALNILRCGRASPGVGISRR

SEQ ID NO: 4364 - protein, 406 aa, Hippocampus kuda
MAMHCDHARFVWNLALEQYGHAQVVGHERWAWDATISGRKPNDPWSKRVANSRIKVVFDQYQRDLADARQGSWLGEGSSSVQQVALRDLRQAFQNHWNNPAHFGKPTWRSKNQGSQGFTVRDVTVRKLSRRWAEVTVPKAGRVRFRLSRPIPAEHGMGRVTLDRAGRWHVSFSAPQPEIDRQSTGAAVGVDRGVTDSIATSDGQLDRCPGLNRQEAARKKRLQRRMARQVPGSNRRKATKRAIAKLAAREADRRKDWLERTSTRLVRDYDVIAMEALNVKAMMASASGTVDQPGRNVVQKRGLNRAIAAQGWSMLATRTRQKAEASGVAYVEVPAAWTSQWCSCCGGIGDRSGKVFRCDRCDVVVDADVNAARNVRAAGLAVLGREGDGAVRPPDAASTSRIEAHS

SEQ ID NO: 4365 - protein, 607 aa, Ectocarpus sp.
MSRYTGSFRYIVGLFSNYVVIRRLEQGLQPPEVKKVFYDRCWAAINIRISGKNTRNDFSDLLDEFIDQSGFDTSLFPPKVPCRLQETVTREMEVSAKNSIVVHLEAKIKGFLRFRLMNDSQLAFQHLPAKDRSRIIVSLSNDCLEREMREDLDPGYVPHVLQVRDLLAQVYSTEPDVPVLKILKKKPHLFLELISMISRVAEEASDNNRALREETKTRSDEEKVRKAFYISERIKRGLVDRPKMCTVLPVWKLAPCFPYYSSSVVGSIFHKEGHDFSSVSRFISEHFDLRRVNRKGYKPSGFRSDGYQVQVTFMALVSKKPHVPGTTDLAKSGYQIAKKVVSLETQERGLFVLSQARKDSRKIVADRVHAYNLTVVDPGCASVVSVRSCPLEFCRCVGSVREKSTDWEMKGTEYSVKSGRTMLEGREKKRRSNDEYGRCFPRFSAVKKKTARKSSFLAYCRVAAETFKVMFAEKMKRARKRSRFHSSRLVQKTVDKLASNIAACPSDRKNIVLFGNGSFRAMKGHASAPRKKLVRAICSRVNVGMLDEFRTSKMCPGGCGGEMTDVQGGREGRTVERVTEATWQTGSGQATDSVAGSLIFLATLFLD

SEQ ID NO: 4366 - protein, 797 aa, Ectocarpus sp.
MATELCVKDGIRVTCEEVVSESNNLGVEVVDGADVFGIGSADATGLPVVTGDISDARKPDNLIDAEEAEAAKRLRIKMMKLKEERAVAAVGGGANVSGAATVPVVADGLSDAAGVKSGASSGVGGDEKGIWRGENGAPSGKERGTEDKTKKKYKPPKQVSPDESDGVRAVVAALRKAFAQAKLRNNDAKAAGKQEDDVHKRLEQGLQPPEVKKVFYDRCWAAINIRISGKNTRNDFSDLLDEIIDQSGFDTSLFPPKVPCRLQETVTREKEVSAKNSIVVHLEAKIKGFLRFRLMNDSQLAFQHLPAKDRSRIIVSLSNDCLEREMRGDLDPGYVPHVLQVRDPLAQVYATEPDVPVLKILKKKTHLFVELISMISNVAEEASDNNRALREETKTRSDEEKVRKAFYMSERIKRGLVDRPKTCTVLPVWKLAPCFPHYSSSVVGSIFHKEGHDFSSVSRFISEHFDLRRVNRKGYKPSGFRSDGYQVQVTFMALVSKKPHVPGTTDLAKSGYQIAKKVVSLETQERGLFVLSQARKDSRKIVADRVHANNLTVVDPGCASVVSVRSCPLEFCRCCRERSRESTDWEMKGTEYSVKSGRTMLEGREKKRRSNDEYGRCFPRFSAVKKKTARKSSFLAYCRVAAETFKVMFAEKMKRARKRSRFHSSRLVQKTVDKLASNIAACPSDRKNIVLFGNGSFRAMKGHASAPRKKLVRAICSRVNVGMLDEFRTSKMCPGGCGGEMTDVQGEKDKEYKAGDWFTKHTVYGVGKYPKGFEELVQKVENQTDGFRWSSWRQDGE

SEQ ID NO: 4367 - protein, 308 aa, Tetradesmus acuminatus
MEKQMHAAAVEFVTDVRRQLGLPDAGAKLTESYAKRNQQHMLLFLAWLQRRVEALGGKGVRLCPVFSVRRQHVQLDCTTLLHMLSGMRLVPEHLMVKQGEATDWEGVLDLVAGVFEPPCPAKQKGKLQWCTIVHAATQVQGTRTLEWTLPRKRYRLESGLAQAQAKARRWDTAMIGGAWKQMNQQGGALRSSSLQQLTQHIAAYNSAAEEWWTSAMQRKRAKLRFRTYGGRKRCLDRFFSGLERDVTAAEPNKRLAIAYECSKFLNRDRSAALNIRFLFTQTQLLGCSMPTQFVARRKQKKPKRNQAS

SEQ ID NO: 4368 - protein, 937 aa, Autographa gamma
MPCPSCGKDDHQRSSSAKCTNRKRRIRETELSANQEVSVYSVKKGLTSIVCPLGNKRDMILKTIRDDVKELSRLSIELSYLINHFYKRYASREDFYILFPKFEALQFTYVLKGAQHKLNDPENVLDEYLSNRAKRFYDCKLRSFNIMQIAINYSTMLETNISVHAFKRLKRYMHLKCGDKLNKSEIHASTYDAYYNKVHRSNEIGEWFAMNKIDSGDVKQNFWKHIRLFIKIQEDLNQSNQKSFSVFPIYSNGLLHITYDTRCIHELLRRVDPANTPSAWSKFSEDPKSYWARHFIIPPKFGYSIATDGVSVSMSMNRIVSKGTKFKSKKVKKVEDSIENLKAKSNSYSKIISVDPGAKTPIVTCTRSVDGGFEYRVLKKERVVYESKELHREKKRSKFIKDIEDRIKLDREKVEHETGVIITTKSADICEYTRFQLKWFDEKQKVYEQRRLQRLKFDKYINDQKMLHKLVDEYFGKEPDTLVVYGAGFDFMNTGTFKGHRKFRHNDVLKIIRQRKNLSVFIINEAFTTKNCSKCYESGLKNHLHVSKSPHRYVYCSVEPEPGKGIIRYALSDRTFIDKGWTMLPTEKVVRKMNVYRMRPAHPEFDWFEHNKNKRLMTYDTGEKLAEFDDNGRGRWYYRNGRLALDYYDAEETNAQQRFVIYSSGEPDERGRSHPITILATFDYLGNGIVFDHAGKIRLKYNQTEGVVLDRGIGPVSHWKWHTLNDPPVLQQVMIDTQMAHKDPQIIKLGTAADNKIRPDNEEMLAIEFDNFIKEKSKKLSQKFKPFQIKMKALKINEHFSLKVLDQATVYLIFRDGSTNLKLNIGMILDHQEIVDTDTAEVGEVSNNLERFPARTDSLAGLQRSVAYAQRYERTRTERERRLRPAEPCESADQLTAAASPPLRPPLRTVPTGSTSSAANCRCRKPTNNLYYNTRLL

SEQ ID NO: 4369 - protein, 601 aa, Autographa gamma
MPCPSCGKDDHQRSSSAKCTNRKRRIRETELSANQEVSVYSVKKGLTSIVCPLGNKRDMILKTIRDDVKELSRLSIELSYLINHFYKRYASREDFYILFPKFEALQFTYVLKGAQHKLNDPENVLDEYLSNRAKRFYDCKLRSFNIMQIAINYSTMLETNISVHAFKRLKRYMHLKCGDKLNKSEIHASTYDAYYNKVHRSNEIGEWFAMNKIDSGDVKQNFWKHIRLFIKIQEDLNQSNQKSFSVFPIYSNGLLHITYDTRCIHELLRRVDPANTPSAWSKFSEDPKSYWARHFIIPPKFGYSIATDGVSVSMSMNRIVSKGTKFKSKKVKKVEDSIENLKAKSNSYSKIISVDPGAKTPIVTCTRSVDGGFEYRVLKKERVVYESKELHREKKRSKFIKDIEDRIKLDREKVEHETGVIITTKSADICEYTRFQLKWFDEKQKVYEQRRLQRLKFDKYINDQKMLHKLVDEYFGKEPDTLVVYGAGFDFMNTGTFKGHRKFRHNDVLKIIRQRKNLSVFIINEAFTTKNCSKCYESGLKNHLHVSKSPHRYVYCSVCRKGIHRDKNGAKNILLKYEYTKLPNSLSSIGTDMNRTDGGSS

SEQ ID NO: 4370 - protein, 601 aa, Autographa gamma
MPCPSCGKDDHQRSSSAKCTNRKRRIRETELSANQEVSVYSVKKGLTSIVCPLGNKRDMILKTIRDDVKELSRLSIELSYLINHFYKRYASREDFYILFPKFEALQFTYVLKGAQHKLNDPENVLDEYLSNRAKRFYDCKLRSFNIMQIAINYSTMLETNISVHAFKRLKRYMHLKCGDKLNKSEIHASTYDAYYNKVHRSNEIGEWFAMNKIDSGDVKQNFWKHIRLFIKIQEDLNLSNQKSFSVFPIYSNGLLHITYDTRCIHELLRRVDPANTPSAWSKFSEDPKSYWARHFIIPPKFGYSIATDGVSVSMSMNRIVSKGTKFKSKKVKKVEDSIENLKAKSNSYSKIISVDPGAKTPIVTCTRSVDGGFEYRVLKKERVVYESKELHREKKRSKFIKDIEDRIKLDREKVEHETGVIITTKSADICEYTRFQLKWFDEKQKVYEQRRLQRLKFDKYINDQKMLHKLVDEYFGKEPDTLVVYGAGFDFMNTGTFKGHRKFRHNDVLKIIRQRKNLSVFIINEAFTTKNCSKCYESGLKNHLHVSKSPHRYVYCSVCRKGIHRDKNGAKNILLKYEYTKLPNSLSSIGTDMNRTDGGSS

SEQ ID NO: 4371 - protein, 212 aa, Hypena proboscidalis
MIIRKLSLLYISDQDIEDRIRIDREATELETGITLTPKSCNVKAYTRFQLKWFEEKQRVYEQRRLQRLKFDKYINEQKTLNKFVDEYFGEAPDTLVVYGAGFNFMNKGTFKGHRKFRHNEVLKIAKQRKNLTVFVINEAFTTKNCSYCYESGAKNTLLVSKSPHRYVYCSVCRKGIHRDKNGAKNILLKYEYTKSPVGLSSSGTDMNRMDGH

SEQ ID NO: 4372 - protein, 601 aa, Hypena proboscidalis
MVCPSCGKNDHQRSSSAKCLNRKRRIRETGLSDDQEVSVYCVKKGLTSVLCPLSDRKDALLATIRDDVRELSRLTIELSYLINYFYKQYSDRDDFLKLFPKLDALQFTYVLKGAKYKIPDPDNVISEYLSARGSRTKLYDGRLRSFNIMQIANQYSTSLETNIKTHAFKRLKRYMYHKFGEEMDKSEIHASTYDAFYNNMRRPNQIGRWFDEKTTTVEIDRNFWNHIPLFIKIQKELNECSKTSFNVFPLYSHGLKYISYDSRGFHELLRRVDPINTPSTWTKFSENLALYWRRHLTLPSKFGFNFSTDGVCISLSMNRIVAKGTKFKSKRVKKEESSHENTLSGAGKNYSKIISVDPGAKTPIVTCTRANDGSFIYKILKKECVVYESKEHHRTRKRLRLIKDIEDRIRIDREATELETGITLTPKSCNVKAYTRFQLKWFEEKQRVYEQRRLQRLKFDKYINEQKTLNKFVDEYFGEAPDTLVVYGAGFNFMNKGTFKGHRKFRHNEVLKIAKQRKNLTVFVINEAFTTKNCSYCYESGAKNTLLVSKSPHRYVYCSVCRKGIHRDKNGAKNILLKYEYTKSPVGLSSSGTDMNRMDGH

SEQ ID NO: 4373 - protein, 802 aa, Hypena proboscidalis
MPCSSCGKDDHLRSSSSKCLKRKKRVRETDLTEDQEISIYCVKKGINSFICSLYENRLELLKLIRDDVKQLSRLSIELSYLINYFFKSYHAHEDFHKLWPKFDPLQFTYVLKEKELKQNFWKFIPLFLDIQHELYEKDKKSFNIFPIYTHGLKYITYDSRCLHELLRRIDAKNVPSTWVQFAEHDPKVYWRRYFNVPKNFGWSFSTDGVCVSLSMNRLIPKKDKFKAKRLKKEEASSENDNQLLYKKYKKIIAVDPGAKTPIVTCSRRKEDDTFEYKVLKNTKVIYETKEHAREKKRLKFIKDVDLKIRKDRESLEIDISRKSANVEDYTKFQLKWFDEKQKFYEQRRLQRLKFDKYINDQKTNHKIVDEYFGRETDTLVVYGAGFDFMNKGTFKGHRKFRHNDILKIIKQRKNLSLYIINEAFTTKNCSKCYENEERQNILHVSKSPHRYVYCSVCRKGIHRDKNGAKNILLKFEYKQNKLPVIPSFTGADMNFASGGSSSTCINGLICRFLSSAEVSTALRPFYFSVHPDLFGKYPEQRKINESSLQQLSALLEAQQSSKRMSVPPLPFYLRQKNKPIGEFKLVNIQLNSADVRETIVKVLNACDMSTTYVDKIPKSPKKKTDFSKFDYAKAQQYSEDLERAAFIKRKVKEKKAITNIVEWVFENSSLGKQKFESAGATRNQVKSLIDQLLKDYGIKEVKYDRGWNISHIRGALQSLVFLATQHSANMVNLKGRTIALGQFTGVSLDGDVFLNIIDVRNEWLSLINKVDQEDSALHMIPMYEKTLSSILRGIHICRRYYK

SEQ ID NO: 4374 - protein, 548 aa, Hypena proboscidalis
MVCPSCGKNDHQRSSSAKCLNRKCRIRETGLSDDQEVSVYWVKKGLTSVLCPLSDRKYALLATIRDDIRELSRLTIELSYLINYFYKRYSDRDDFLKLFPKLDALQFTYVLKGAKYKIPDPDNVISEYLSARGSRTKLYDGRLRSFNIMQIANQYSTSLETNIKTHAFKRLKRYMYHKFGEEMDKSEIHASTYDAFYNNMRRPNQIGRWFDEKTTTVEIEKNFWNHIPLIIKIQKELNECSKTSFYMFPLYSHGLKYISYDSRGFHELLRRVDPINTPSTWTKFSENFALYWRRHLTLPSKFGFNFSTDGVCISLSMNRIVAKGTKFKSKRVKKEESSHENTLSGAGKNYSKIISVDPGAKTPIVTCTRANDGSFIYKILKKECVVYESKEHHRTRKRLRFIKDIEDRIRIDREATELETGITLPPKSCNVKAYTRFQLKWFEEKQRVYEQRRLQRLKFDKYINEQKTLNKFVDKYFGKAPDTLVVYGAGFNFMNKGTFKGHRKFRHNEVLKIAKQRKKLTVFVINEAFTTKNCSYCYESGAKNTLLV

SEQ ID NO: 4375 - protein, 263 aa, Hypena proboscidalis
MNRIVAKGTKFKSKRVNKKEESSHENTLSGAGKNYSKIISVDPGAKTPIVTCTRANDGSFIYKILKKECVVYESKEHHRTRKRLRFIKDIEDRIRIDREATELETGITLTPKSCNVKAYTRFQLKWFEEKQRVYEQRRLQRLKFDKYINEQKTLNKFVDEYFGEAPDTLVVYGAGFNFMNKGTFKGHRKFRHNEVLKIAKQRKNLTVFVINEAFTTKNCSYCYESGAKNTLLVSKSPHRYVYCSVCRKGIHRDKNGAKNILLK

SEQ ID NO: 4376 - protein, 334 aa, Hypena proboscidalis
MYHKFSENLTKAIIHKSTFEAFYKNTYIDNEIGNWFKIHKISEKELKQNFWKFIPLFLDIQHELYENDKKSFNIFPIYTHSLKYITYDSRCLHELLRRIDAKNVPSTWVQFAEHDPKVYWRRYFNVPKNFGWSFSTDGVCVSLSMNRLIPKKDKFKAKRLKKEEASSKNDNQLYKKYKKIIAVDPGAKTPIVTCSCRKEDDTFEYKVLKNTKVIYETKEHAREKKRLKFIKDVDLKIRKDRESLEIDISRKSANVEDYTKFQLKWFDEKQKFYEQRRLQRLKFDKYINDQKTNHKIVDEYFGRETDTLVVYGAGFDFMNKGTFKGHRKLDIMIF

SEQ ID NO: 4377 - protein, 500 aa, Hypena proboscidalis
MPCSSCGKDDHLRSSSSKCLKRKKRVRETDLTEDQEISIYCVKKGINSFICSLYENRLELLKLIRDDVKQLSRLSIELSYLINYFFKSYHAHEDFHKLWPKFDPLQFTYVLKEKELKQNFWKFIPLFLDIQHELYEKDKKSFNIFPIYTHGLKYITYDSRCLHELLRRIDAKNVPSTWVQFAEHDPKVYWRRYFNVPKNFGWSFSTDGVCVSLSMNRLIPKKDKFKAKRLKKEEASSENDNQLYKKYKKIIAVDPGAKTPIVTCSRRKEDDTFEYKVLKNTKVIYETKEHAREKKRLKFIKDVDLKIRKDRESLEIDISRKSANVEDYTKFQLKWFDEKQKFYEQRRLQRLKFDKYINDQKTNHKIVDEYFGRETDTLVVYGAGFDFMNKGTFKGHRKFRHNDILKIIKQRKNLSLYIINEAFTTKNCSKCYENEERQNILHVSKSPHRYVYCSVCRKGIHRDKNGAKNILLKFEYKQNKLPVIPSFTGADMNFASGGSS

SEQ ID NO: 4378 - protein, 616 aa, Hypena proboscidalis
MKSSPINCLQVECGDPPLRLRRQYLSDRFVFRCQQFVNHPLSKRVADLSEEVATSRYWSKRSAPCLVESLSKWKAIEAPAHQSELLPIFHCNYHELVLFPNIQYNIVSFAWVPAHCGISGNEKADLLAKDAVVCGDIFPYLNYHHDLSTLPRVYLKESWNKFWAEYNLKGKFYRSIQHNIPAKPWFSKCLFNKLVTSIIIRMRLGHNCTQSHLARINVINSPDCPCGTEKELKQNFWKFIPLFLDIQHELYEKDKKSFNIFPIYTHGLKYITYDSRCLHELLRRIDAKNVPSTWVQFAEHDPKVYWRRYFNVPKNFGWSFSTDGVCVSLSMNRLIPKKDKFKAKRLKKEEASSENDNQLYKKYKKIIAVDPGAKTPIVTCSRRKEDDTFEYKVLKNTKVIYETKEHAREKKRLKFIKDVDLKIRKDRESLEIDISRKSANVEDYTKFQLKWFDEKQKFYEQRRLQRLKFDKYINDQKTNHKIVDEYFGRETDTLVVYGAGFDFMNKGTFKGHRKFRHNDILKIIKQRKNLSLYIINEAFTTKNCSKCYENEERQNILHVSKSPHRYVYCSVCRKGIHRDKNGAKNILLKFEYKQNKLPVIPSFTGADMNFASGGSS

SEQ ID NO: 4379 - protein, 601 aa, Hypena proboscidalis
MVCPSCGKNDHQRSSSAKCLNRKRRIRETGLSDDQEVSVYCVKKGLTSVLCPLSDRKDALLATIRDDVRELSRLTIELSYLINYFYKRYSDRDDFLKLFPKLDALQFTYVLKGAKYKIPDPDNVISEYLSARGSRTKLYDGRLRSFNIMQIANQYSTSLETNIKTHAFKRLKRYMYHKFGEEMDKSEIHASTYDAFYNNMRRPNQIGRWFDEKTTTVEIDRNFWNHIPLFIKIQKELNECSKTSFNVFPLYSHGLKYISYDSRGFHELLRRVDPINTPSTWTKFSENLALYWRRHLTLPSKFGFNFSTDGVCISLSMNRIVAKGTKFKSKRVKKEESSHENTLSGAGKNYSKIISVDPGAKTPIVTCTRANDGSFIYKILKKECVVYESKEHHRTRKRLRLIKDIEDRIRIDREATELETGITLTPKSCNVKAYTRFQLKWFEEKQRVYEQRRLQRLKFDKYINEQKTLNKFVDEYFGEAPDTLVVYGAGFNFMNKGTFKGHRKFRHNEVLKIAKQRKNLTVFVINEAFTTKNCSYCYESGAKNTLLVSKSPHRYVYCSVCRKGIHRDKNGAKNILLKYEYTKSPVGLSSSGTDMNRMDGH

SEQ ID NO: 4380 - protein, 350 aa, Apotomis turbidana
MIKRGDASFIIFPQPSHGLKHVTYTSKGWHELLRRVDPTSTPSDWTKITDHRQELWAPYLDSKTIDMKKFGCTVQTDGCSVSISMSRRMITTKKENLKKFKASYDRTVAVDPGSRVPIAACDDRYGFKRITKKWIRSHTLEWKRDRVRKKLLEKSETDERLDRERIQKELEVVLTPKSSSGAAHYATFRLKWFEARQKPFETHSKLTRLKLDAYINVTRTNERIVREVFLRYTPSDRVLVLYGAGSKFMNRATFSGRKFGHDDLLKKLRAKRNITVETVNEAYTSQACSACNARDGSFHRLKIDHRLRRGVCPDCNGAPLDRDYNAARNILINHTRSTFCRPSFAKYGGA

SEQ ID NO: 4381 - protein, 617 aa, Apotomis turbidana
MGERVATSAEDTLVRYDNPVLVTKKLEKAPVGVAAAAAQPCIPTEAKRETEEILNAILPPKEWEEEGQIWTQKIASTPATRLDVINLQEMLDTLLQQRQARETGINTGMYVICTGIVGDVLSDFVMTVWLGDDKLRRERLAAPEDRLYSLCSTVMVCKSCGGTDHQRRSSKLCKNHLAPIRKRGVEDELHDVEVVLTQSTRTHLTTHAYSRLVRYFKVKRSDRRLNDAFFEKRYTSDEDELNAVCRVINVDSPWYTTIPEWLRIQEAMIKRGDASFIIFPQPSHGLKHVTYTSRGWHELLRRVDPTSTPSDWTKITDHRQELWAPYLDSKTIDMKNFGCTVQTDGCSVSISMSRRMITTKKEKLKKFKASYDRTVAVDPGSRVPIAACDDRYGFKRITKKWIRSHTLEWKRDRVRKKLLEKSETDERLDRERIQKELEVVLTPKSSSGAAHYATFRLKWFEARQKPFETHSKLTRLKLDKYINVTRTNERIVREVFLRYTPSDRVLVLYGAGSKFMNRATFSGRKFGHDDLLKKLRAKRNITVETVNEAYTSKACSACNARDGSFHRLKIDHRLQRGVCPDCNGAPLDRDYNAARNILINHTRSTFCRPSFAKYGGA

SEQ ID NO: 4382 - protein, 570 aa, Apotomis turbidana
MVCKSCGGTDHQRRSSKLCKNHLAPIRKRGVEDELHDVEVYVVKRGLRSALCPLLDDLMTNRLLREIRSDVAELSRIYIKLGIFIDFYFKTVNCDASIKSFQDMLNFVYALKGKGPYAEAYARMIEGHHVSSYDGRLRSYIVQELAKQYWTVLKTNLTTHAYSRLVRYFKVKRSDRRLNDAFFEKRYTSDEDELNAVCRVINVDSPWYTTIPEWLRIQEAMIKRGDASFIIFPQPSHGLKHVTYTSKGWHELLRRVDPTSTPSDWTKITDHRQELWAPYLDSKTIDMKKFGCTVQTDGCSVSISMSRRMITTKKENLKKFKASYDRTVAVDPGSRVPIAACDDRYGFKRITKKWIRSHTLEWKRDRVRKKLLEKSETDERLDRERIQKELEVVLTPKSSSGAAHYATFRLKWFEARQKPFETHSKLTRLKLDKYINVTRTNERIVREVFLRYTPSDRVLVLYGAGSKFMNRATFSGRKFGHDDLLKKLRAKRNITVETVNEAYTSKACSACNARDGSFHRLKIDHRLRRGVCPDCNGAPLDRDYNAARNILINHTRSTFCRPSFAKYGGA

SEQ ID NO: 4383 - protein, 262 aa, Apotomis turbidana
MITTKKEKLKKFKASYDRTVAVDPGSRVPIAACDDRYGFKRITKKWIRSHTLEWKRDRVRKKLLEKSETDERLDRERIEKELEVVLTPKSSSGAAHYATFRLKWFEARQKPFETHSKLTRLKLDKYINVTRTNERIVREVFLRYTPSDRVLVLYGAGSKFMNRATFSGRKFGHDDLLKKLRAKRNITVETVNEAYTSKACSACNARDGSFHRLKIDHRLRRGVCPDCNGAPLDRDYNAARNILINHTRSTFCRPSFTKYGGA

SEQ ID NO: 4384 - protein, 570 aa, Apotomis turbidana
MVCKSCDGTDHQRRSSKLCKNHLAPIRKRGVEDELHDVEVYVVKRGLRSVLCPLLDDLMTNRLLREIRSDVAELSRIYIKLGIFIDFYFKTVNCDASIKSFQDMLNFVYALKGKGPYAEAYARMIEGHHVSSYDGRLRSYTVHELAKQYWTVLKTNMTTHAYSRLVRYFKVKRSDRRLNDAFFEKRYTSDEDELNAVCRVINVDSPWYTTIPEWLRIQEAMIKRGDASFIIFPQPSHGLKHVTYTSRGWHELLRRVDPTSTPSDWTKITDHRQELWAPYLDSKTIDMKNFGCNVQTDGCSVSISMSRRMITTKKEKLKKFKASYDRTVAVDPGSRVPIAACDDRYGFKRITKKWIRSHTLEWKRDRVRKKLLEKSETDERLDRERIEKELEVVLTPKSSSGAAHYATFRLKWFEARQKPFETHSKLTRLKLDKYINVTRTNERIVREVFLRYTPSDRVLVLYGAGSKFMNRATFSGRKFGHDDLLKKLRAKRNITVETVNEAYTSKACSACNARDGSFHRLKIDHRLRRGVCPDCNGAPLDRDYNAARNILINHTRSTFCRPSFTKYGGA

SEQ ID NO: 4385 - protein, 570 aa, Apotomis turbidana
MQRARASFTILVSSKNTDHVLEYTVFRMQWFDAMHAPYEKHSKLTRFGLDKYMRTAKCQERIVKEVFDGGGVENVLVLYGAGSKFMNVASFSGRKFKHDALLKKLHSKANITVEIVDEAYTSQACSACNERTGAFIKIGMDRRLRWGTCPVCHSQFDRDANAAKNILVNHISGIVRVLIHNGFLHGGDWRDCDSRSGLAYSRLLCETAEQMQAHIKRFAVGFNATKTQACLFSAKRSPFDLTPTFQGVSVPISDHLELLGMTLSSNLNFGQYIESLATTAAKKLGILSKWAICRATEWIPDEELHMNSKHVGPFLTVFTLTIKEHVIARTSAGFWSDQTRTIHEVCNSCPFVLSNGKHSIEVIDALTAELLDMDVISDKFEPMSPGVIDHVWGFFSGVRQRGMQTMEEMLRDGSYITAVGELSGPPGALKIQPPRDGLPLYLTTATKSSLLKRLASSRDFLRVLVVIFGTVAVLASSRIAYKYIARRRRRAREEGVKKQLAAGRRERRARARDKDLGEAQLCVVCAENPKEIILLPCGHVCLCEDCSDNIIDNCPICRERIESRAPAFIT

SEQ ID NO: 4386 - protein, 492 aa, Apotomis turbidana
MPGCKACGGADHLRRSSVKCARHLPPIRKRKLESGCDVQVYVVKRSLGSLLCPLLDGPQRTRLLEEIKRDVRDLSRLYIELGIFHNLYMKTTQALPPKPDVLQFVYAMKGKGPYAAEYFGTGRRYDGKLRSYTVQELAKQYETILHTNICTHAYSRLARYFRVKRNDERLYNAYFKKVMPEEDEISREIARVCATINGDTVKGPRWWPTISEWMRIQDAMKIRSFRLFPQPSHGLKHVTYTSRGWHELLRRVAPETVPGDWTAITDHLRQLWAPWLDLPSNTKFGCCLQTDGISVSASMNRIVKEKKVLAKLIKKPYDRIVAVDPGSRIPIAAVESKRFAFKRITKKYDVIQRARASFTFPVSSKNTDHVLEYTVFRMQWFDAMQAPYEIHSKLTRFGLDKYMRTAKCQERIVKEVFDGGGVENVLVLYGAGSKFMNVASFSGRKFKHDALLKKLHSKANITVEIVDEAYTSQACSACNERTGAFIKIGMDR

SEQ ID NO: 4387 - protein, 570 aa, Apotomis turbidana
MVCKSCDGTDHQRRSSKLCKNHLAPIRKRGVEDELHDVEVYVVKRGLRSALCPLLDDLMTNRLLREIRSDVAELSRIYLKLGIFIDFYFKTVNCDASIKSFPDMLNFVYALKGKGPYAEAYARMIEGHHVSSYDGRLRSYTVQELAKQYWTVLKTNLTTHAYSRLVRYFKVKRSDRRLYDAFFEKRYTSDEDELNAVCRVINVDSPWYTTIPEWLRIQEAMIKRGDASFIIFPQPSHGLKHVTYTSRGWHELLRRVDPTSTPSDWTKITDHRQELWAPYLDSKTIDMKKFGCTVQTDGCSVSISMSRRMITTKKEKLKKFKASYDRTVAVDPGSRVPIAACDDRYGFKRITKKWIRSHTLEWKRDRVRKKLLEKSETDERLDRERIQKELEVVLTPKSSSGAAHYATFRLKWFEARQKPFETHSKLTRLKLDKYINVTRTNERIVREVFLRYTPSDRVLVLYGAGSKFMNRATFSGRKFRHDDLLKKLRAKRNITVETVNEAYTSKACSACNARDGSFHCLKIDHRLRRGVCPDCNGAPLDRDYNAARNILINHTRSTFCRPSFTKYGGA

SEQ ID NO: 4388 - protein, 262 aa, Xestia xanthographa
MTRYLSIEHLQHAGVHLPRVLAMFFSLCLSHAHLRSDLMKTVVVPIVKDKTGDTSDLSNYRPISLATVIAKVLLPEPVEVLQPAASQFTEQTVQQQQLLCIQDVNQTLQQFWSTESVPQCFSEKGSEHDLCEDEYFGKAPDTLVVYGAGFDFMNKGTFKGHRKFRHNELLKIAKQRKNSSVFVINEAFTTKNCSYCYESGAKNTLRASKSPHRYVYCSVCRKGIHRDKNGAKTILLKYEYTKSPVGLSSSGTDMNLVDGGSS

SEQ ID NO: 4389 - protein, 602 aa, Xestia xanthographa
MVCPSCGKNDHQRSSSAKCLNRKRRQRETGLSDDQEVSVYCVKKGLTSVLCPLSDRKDALLKTIRDDVRELSRLTIELSYLINYFYKRYSDRDDFLKMFPKLNALQFTYVLKGAKHKIPDPDNVIAEYLSARGGVKLYDGYLRSFNIMQIANQYSTILETNITIHAFKRLKRYMYHKFGDELDKSDVHASTYDAFYNNTRRPNQIGRWFDEKLTAVEIKKNFWNHIPLFIKIQQELNEHSKASFNVFPLYSHGLKYISYDSRCFHELLRRVDPIDTPSAWTKYSGNSALYWRRHFTLPSKFGYNFSTDGVCIALSMNRIVVKGAKFKSKRVKKEESSHENTLAGTGKNYSKIISVDPGAKTPIVTCTRTDDGSFMYKILKKERVVYESKEHHRTRKRLRYIKVVEGRIRLDREATELETGIALTPKSCNVQAYTRFQLKWFDEKQRVYEQRRLQRLKFDKFINDQKMLNKLVDEYFGKAPDTLVVYGAGFDFMNKGTFKGHRKFRHNEVLKIARQRKNLSVFVINEAFTTKNCSYCYESGAKNTLRVSKSPHRYVYCSVCRKGIHRDKNGAKNILLNYEYTKSPVGLSSSGTDMNLVDGGSS

SEQ ID NO: 4390 - protein, 285 aa, Xestia xanthographa
MNRIVVKGAKFKSKRVKKEESSHENTLAGTGKNYSKIISVDPGAKTPIVTCTRTDDGSFMYKILKKEHVVYESKEHHRTRKRLRYIKVVEDRIRLDREATELETGIALTPKSCNVQAYFQLKWFDEKQRVYEQRRLQRLKFDKFINDKKMLNKLVDEYFGKAPDTLVVYGAGFDFMNKGTFKGHRKFRHNEVLKIARQRKNLSVFVINEAFTTKNCSYCYESGAKNTLRVSKSPHRYVYCSVCRKGIHRDKNGAKNILLKYEYTKSPVGLSSSGTDMNLVDGGSS

SEQ ID NO: 4391 - protein, 446 aa, Xestia xanthographa
MVCPSCGKNDHQRSSSAKCLNRKRRQRETGLSDDQEVSVYCVKKGLTLVLCPLSDRKDALLTTIRDDVRELSRLTIELSYLINYSYKRYSDRDDFLKMFPKLDALQFTYVLKGAKHKISDPDNIQQELNEHSKTSFNVSPLYSHGLKYSSYDSRCFHELLRRVDPINTPSAWTKFSENSALYWRRHFTLPSKFGYNFSTDGVCIALSMNRIVVMGAKFKSKRVKKEESSHENTLAGTGKNYSKIISVDPGAKTPIVTCTRTDDGSFMSKILKKERVVYESKKHHRTRKRLRYIKDVEDRIRLDREATELETGIALTPKSCNVQAYTRFQLKWFDEKQRVYEQRRLQRLKFDKFINDQKMLNKLVDEYFGKAPDILVVYGAGFHFMNKGTFKGHRKFRHNELLKIAKQRKNLSVFVINEAFTTKKCSYCYESGAKNTLRVSTPLRIL

SEQ ID NO: 4392 - protein, 244 aa, Noctua fimbriata
MKKFGCSPQTDGISVSLSMNRIKKNSNPIKRSKKTYDRVIAVDPGSRIPVAAVESKRLQFRRITKKYVRSHTLERKRERIRNKLCRVSEEAEQKAREKLTFPVSSKNTSHVVEYTLSRMTWFDVRQEPYEKHAKLTRLGLDKYLRTAKCEEKIIKEVFDGDGVESTLVLYGAGKLVRELEDQQEDEAIDEVSTGIDEEDPPLINNDEQSPLPGTSSELQAFSMNTRNLVWKSNHLFIMSSDRNR

SEQ ID NO: 4393 - protein, 419 aa, Mamestra brassicae
MPDAYRVMFGDRKYDDRLRSFVVQEMAKQYETVLHTNISTHAYARLARYFNVKRNDPALYAAFFKKDLPEDNEKMRRVCTIINVDTVGGAKWWSTIHEWLKIQAKLEDFKLFPQPSHGLKHLTYTSRGWHELLRRVDPKSITSYWTRIVDHRRELWSPWLDVDMKKFGCSLQTDGISVSLSMNRIKKKTNPIKRPKKTYDRVIAVDPGSRIPVAAVESKRLQFRRITKKYVRSHTLEWKRERIRNKLCRVSEEAEQKARENLTFPVSSKNTIHVVEYTVFRMTWFDVRQEPYEKHAKLTRLGLDKYLRTAKCEEKIIKEVFDGGGVESTLVLYGAGSKFMNTASFSGRKFKHTLIKRLRCKRNIDVEVVDEKYTSQACSSCNAKTGEFQKIVMNHRLRWGFAETATASLIETLTLQKTY

SEQ ID NO: 4394 - protein, 217 aa, Mamestra brassicae
MAFKHPVTLFADDSTITILPIKEIYIVRDLSGVYIELGIWINYYMKTAPELPKKPDILFFDARQEPYELHCKLTRLNLDKYLYLRTAKCEERIVKDVYDSGGVEQILVLYGAGSTFMNTATFSRRKFKHDSLILKLKTKRNISVEIVDESYTSQACSSCNQKIDMNNKLRWRVCPTCHSEFDRNANAAKNILINYTRSAICRPGCSSNGDIVSSEEK

SEQ ID NO: 4395 - protein, 505 aa, Cosmia trapezina
MRRVLLPIADVSERIWRLEQHLYPLLLFRPEDGTYMDMFSAKCANRKRRIRETDLSANQEVSVYTVKKGLTSIVCPLGSKRDLLLKTICSDIKELSRLSIELSYLINHFYKRYASREDFYTLFPKFDALQFTYVLKGVKHKLNDPENVLDEYLSYRVSKRFYDCKLRSFNVMQIAIQYSTTLETNISMHAFKRLKRYMHLKYRDKLDKSEIHSSTYEAYYNKVHRSNEIGEWFTVNKIDSGDVKQNFWKHIRLFINIQEELNQINQKSFSVFPIYSHGLLHIAYDTRCVHELLRRVDPANTPSAWSKFSKDPKSYWARHFVIPPKFGYSFATDGKMLQKLVDEFFGNEPDTLVVYGAGFDFMKKGTFKGHRKFRHNDVLKIIRQRKNLSVFIINEAFTTKNCSKCYESVLKNHLHVSKSPHRYVYCSICRKGIHRDKNGAKNILLKYEYTQSPNSLSSIGTDMDRADGGSSNGTRPAPAARPPAPPERSVWLIWLQERVDYGEPW

SEQ ID NO: 4396 - protein, 286 aa, Cosmia trapezina
MNRIVSKGSKFKSKRVKKNEATIENSNVHSKSYSKIISVDPGAKTPIVTCTRSNDGGFEYRVLKKERVLYESKEHHREKKRSRFIKDIEERVKVDREDTERETGVIITLKATDVCDYTRFQLKWFDEKQRVYEQRRLQRLMFDKYINDQKMLHKLVDEFFGKEPDTLVVYGAGFDFMNKGTFKGHRKFRHNDVLKIIRQRKNLSVFIINEAFTTKNCSKCYESVLKNHLHVSKSPHRYVYCSVCRKGIHRDKNGAKNILLKYEYTKSPNSLSSIGTDMDRADGGSS

SEQ ID NO: 4397 - protein, 457 aa, Cosmia trapezina
MHRSYEIGEWFTVNKIDSGDVKQNFWKHIRLFINIQEELNQINQKSFSVFPIYSHGLLHITYDTRCVHELLRRVDPANTPSAWSEFSEDPKSYWARHFVIPPKFGYSFATDGVSVSMSMNRIVSKGSKFKSKRVKKNEATIENSNVHSKSYSKIISVDPGAKTPIVTCTRSNDGGFEYRVLKKERVLYESKEHHREKKRSRFIKDIEERVKFDREDTERETGVIITLKSTDVCDYTRFQLKWFDEKQRVYEQRRLQRLMFDKYINDQKMLHKLVDEFFGKEPDTLVVYGAGFDFMNKGTFKGHRKFRHNDVLKIIRQRKNLSVFIINEAFTTKNCSKCYESVLKNHLHVSKSPHRYVYCSVCRKGIHRDKNGAKNILLKFHISTVCFLLYIQSRRIVFRLSVLIWIVRTVEVRKVHYRNSVFVVATNKGLMREPKQWRQRFYDCLKKCLAIYLIRKI

SEQ ID NO: 4398 - protein, 753 aa, Cosmia trapezina
MHAFKRLKRYMHLKYGDKLDKSEIHSSTYEAYYNKVHRSNEIGEWFTVNKIDSGDVKQNFWKHIRLFINIQEELNQINQKSFSVFPIYAHGLLHITYDTRCVHELLRRVDPANTPSAWSKFSEDPKSYWARHFVIPPKFGYSFTTDGVSVSMSMNRIVSKGSKFKSKRVKKNEATIENSNVHSKSYSKIISVDHGAKTPIVTCTRSNDGGFEYRVLKKERVLYESKEHHREKKRSRFIKDIEECVKVDREDTERETGVIITLKSTDVCDYTRFQLKWFDEKQRVYEQRRLQRLMFDKYINDQKMLHKLVDEFFGKEPDTLVVYGAGFDFMNKGTFKGHRKFRHNDVLKIIRQRKNLSVFIITEAFTTKNCSKCYESVLKNHLHVSKSPHRYVYCSVCRKGIHRDNGAKNILLKYEYTKSPNSLSSIGTDMDRADGGSSAQVKAYGKSIATSNLLRHLKDAHGLDDSLKSQTLTIKEFFTPRTSGRTRYESSKKSDKWSLSRDLALWFARSLMPFDTVDNDAMIDFLKKYSVIVSDADLPSTYNIAREGLEDVYNSMLAYINAFISKQSPRFGAFTTDMWTDKYRRRNYITCTYHFLSEDMTLIKFTLATKEVTKKHTGETIRDEIMEVLRSFKIDQKEIYLVTDAGSNMKRAANLLGFNNHLCIGHALHNLVNVNGIENTREISKIFTKCKRHVRYRAPRVEAAASADQQQMLSSIEEFAEHLENSDSTDTESETTETPERASSSRQRLQPQR

SEQ ID NO: 4399 - protein, 468 aa, Celastrina argiolus
MWIANQYKTILETNVTVHAFKRLKRYMHHKFSEHLTKSQIHESTFNAFYKNVHGDNDAIGKWFKVNKITEKELKQNFWKFIPLFVKIQHELYENDTKSFNVFPIYKHGLKHITYDSRCLHELLRRVDKENTPTNWVQFSENDPKQYWRRCFSLPKKSFGWSMSTDGVCVSLSMNRLVRKEDKFKAKRVKREEVSNENENQMCKNYKKIIAVDPGAKTPIVTCSRSGDGDGFEYKTLKKQRVVYETREHHRERKRLKFIKDVDSKIGNDRESLEKELGFGISCKNSKVQEYTKFTLKWFDKKQKVYEQRRLQRLRFDKYINDQKTNHKIVDEYFGKEPNTLVVYGAGFDFMNKGTFKGHRKFRHNDILKIIKQRPNLSLYIINEALTTKNCSKCYESEMQQKLHVSKSPHRYVYCSKQDHNAGAAEAEHTERGAQRGPRGPLPCTVQAGDGVAAAGEDEPCGGATTDTC

SEQ ID NO: 4400 - protein, 465 aa, Celastrina argiolus
MWIANQYKTILETNVTVHAFKRLKRYMHHKFSEHLTKSQIHESTFNAFYKNVHGDNDAIGKWFKVNKITEKELKQNFWKFIPLFVKIQHDLYENDTKSFNVFPIYKHGLKHITYDSRCLHELLRRVDKENTPTNWVQFSENDPKQYWRRCFSLPKKSFGWSMSTDGVCVSLSMNRLVRKEDKFKAKRVKREEVSNENENQMCKNYKKMIAVDPGAKTPIVTCSRSGDGDGFEYKTLKKQRVVYETREHHRERKRLKFIKDVDSKIGNDRESLEKELGFGISCKNSKVQEYTKFTLKWFDEKQKVYEQRRLQRLRFDKYINDQKTNHKIVDEYFGKEPNTLVVYGAGFDFMNKGTFKGHRKFRHNDILKIIKQRPNLSLYIINEALTTKNCSKCYESEMQQKLHVSKSPHRYVYCSVCRKGIHRDKNGAKNILLKFEFKKNKTNKKSPVILSFVGTDMNVAGGGSS

SEQ ID NO: 4401 - protein, 600 aa, Cyaniris semiargus
MPCKACGKDDHSRSSSSKCSNRKRRVRETELESDEEISVYCVKRGLSSFVCPLYEKKQALLETIRSDVKDLSRLSIELSYLVNYFFKNYYNRKDFHQLFPKFDPLQFTYALKGKNHKLPDPLDIIEKYKLLNKNVTYNGTLRSFNLMWIANQYKTILETNVTVHAFRRLKRYMHHKFAEKLTKSQIHESTFNAFYKNEHGENDAIGKWFKLNKITEKEIKQNFWKYIPLFVKIQHELYENDTKSFNVFPVYKHGLKHITYDSRCLHELLRRVDKENTPSTWVQFSENDPKQYWRRYFSVPKKSFGWSFSTDGVCVSLSMNRLVSKEDKRKAKCVKREEILNENENQMFKNYKRVIAVDPGAKTPIVTCSRSGADSGGFEYKTLKKQRVVYETREHHRERKRLKFTKDVDSKIRNDRESMEKELGFGISCKNSKVQEYTEFQLKWFDEKQKVYEQRRVQRLRFDKYINDQKTNNKIVDEFFGKEPDTLVVYGAGFDFMNKGTFKGHRKFRHNDILKIIKRRANLSLYIINEAFTTKNCSKCYESRVQQKLRVSKSPHRYVYCSVCRKGIHRDKNGAKNILLKFEFKKKYYKVAGHSFVCRY

SEQ ID NO: 4402 - protein, 460 aa, Cyaniris semiargus
MSVPKYITLAGGDKMPRLGFGTWQASENEVEDAVTAALEAGYRHIDTAAAYENEKAIGRALNRWIGNDPDKRKELFIVTKLPPSGNNVKHVEEFFAASLANLGLEYLDLYLIHTPFGFEYVPGDLHPKNPDGSMKFDFSTDLIAVWKCVPPAAHWCTVVSSWCASEKVIVLVLVLSAKKGHLRTIDEGVHRAVGESLTQSYKRVIAVDPGAKTPIVTCSRSGADSGGFEYKTLKKQRVVYETREHHRERKRLKFTKDVDSKIRNDRESMEKELGFGISCKNSKVQEYTEFQLKWFDEKQKVYEQRRVQRLRFDKYINDQKTNNKIVDEFFGKEPDTLVVYGAGFDFMNKGTFKGHRKFRHNDILKIIKRRANLSLYIINEAFTTKNCSKCYESRVQQKLRVSKSPHRYVYCSVCRKGIHRDKNGAKNILLKFEFKKNTIKSPVILSFAGTDMNVAGGGSS

SEQ ID NO: 4403 - protein, 610 aa, Cyaniris semiargus
MPCKACGKDDHSRSSSSKCSNRKRRVRETELESDEEISVYCVKRGLSSFVCPLYEKKQALLETIRSDVKDLSRLSIELSYLVNYFFKNYYNRKDFHQLFPKFDPLQFTYALKGKNHKLPDPLDIIEKYKLLNKNVTYNGTLRSFNLMWIANQYKTILETNVTVHTFRRLKRYMHHKFAEKLTKSQIHESTFNAFYKNEHGENDAIGKWFKLNKITEKEIKQNFWKYIPLFVKIQHELYENDTKSFNVFPVYKHGLKHITYDSRCLHELLRRVDKENTPSTWVQFSENDPKQYWRRYFSVPKKSFGWSFSTDGVCVSLSMNRLVSKEDKRKAKCVKREEILNENENQMFKNYKRVIAVDPGAKTPIVTCSRSGADSGGFEYKTLKKQRVVYETREHHRERKRLKFTKDVDSKIRNDRESMEKELGFGISCKNSKVQEYTEFQLKWFDEKQKVYEQRRVQRLRFDKYINDQKTNNKIVDEFFGKEPDTLVVYGAGFDFMNKGTFKGHRKFRHNDILKIIKRRANLSLYIINEAFTMKNCSKCYESRVQQKLRVSKSPHRYVYCSVCRKGIHRDKNGAKNILLKFEFKKNTIKSPVILSFAGTDMNVAGGGSS

SEQ ID NO: 4404 - protein, 610 aa, Cyaniris semiargus
MPCKACGKDDHSRSSSSKCSNRKRRVRETELESDEEISVYCVKRGLSSFVCPLYEKKQALLETIRSDVKDLSRLSIELSYLVNYFFKNYYNRKDFHQLFPKFDPLQFTYALKGKNHKLPDPLDIIEKYKLLNKNVTYNGTLRSFNLMWIANQYKTILETNVTVHAFRRLKRYMHHKFAEKLTKSQIHESTFNAFYKNEHGENDAIGKWFKLNKITEKEIKQNFWKYIPLFVKIQHELYENDTKSFNVFPVYKHGLKHITYDSRCLHELLRRVDKENTPSTWVQFSENDPKQYWRRYFSVPKKSFGWSFSTDGVCVSLSMNRLVSKEDKRKAKCVKREEILNENENQMFKNYKRVIAVDPGAKTPIVTCSRSGADSGGFEYKTLKKQRVVYETREHHRERKRLKFTKDVDSKIRNDRESMEKELGFGISCKNSKVQEYTEFQLKWFDEKQKVYEQRRVQRLRFDKYINDQKTNNKIVDEFFGKEPDTLVVYGAGFDFMNKGTFKGHRKFRHNDILKIIKRRANLSLYIINEAFTTKNCSKCYESRVQQKLRVSKSPHRYVYCSVCRKGIHRDKNGAKNILLKFEFKKNTIKSPVILSFAGTDMNVAGGGSS

SEQ ID NO: 4405 - protein, 535 aa, Cyaniris semiargus
MPCKACGKDDHSRSSSSKCSNRKRRVRETELESDEEISVYCVKRGLSSFVCPLYEKKQALLETIRSDVKDLSRLSIELSYLVNYFFKNYYNRKDFHQLFPKFDPLQFTYALKGKNHKLPDPLDIIEKYKLLNKNVTYNGTLRSFNLMWIANQYKTILETNVTVHAFRRLKRYMHHKFAEKLTKSQIHESTFNAFYKNEHGENDAIGKWFKLNKITEKEIKQNFWKYIPLFVKIQHELYENDTKSFNVFPVYKHGLKHITYDSRCLHELLRRVDKENTPSTWVQFSENDPKQYWRRYFSVPKKSFGWSFSTDGVCVSLSMNRLVSKEDKRKAKCVKREEILNENENQMFKNYKRVIAVDPGAKTPIVTCSRSGADSGGFEYKTLKKQRVVYETREHHRERKRLKFTKDVDSKIRNDRESMEKKLGFGISCKNSKVQEYTEFQLKWFDEKQKVYEQRRVQRLRFDKYINDQKTNNKIVDEFFGKEPDTLVVYGAGFDFMNKGTFKGHRKFRHNDILKIIKRRAKGTVHFRPSVNTML

SEQ ID NO: 4406 - protein, 474 aa, Cyaniris semiargus
MPCKACGKDDHSRSSSSKCSNRKRRVRETELESDEEISVYCVKRGLSSFVCPLYEKKQALLETIRSDVKDLSRLSIELSYLVNYFFKNYYNRKDFHQLFPKFDPLQFTYALKGKNHKLPDPLDIIEKCLHELLRRVDKENTPSTWVQFSENDPKQYWRRYFSVPKKSFGWSFSTDGVCVSLSMNRLVSKEDKRKAKCVKREEILNENENQMFKNYKRVIAVDPGAKTPIVTCSRSGADSGGFEYKTLKKQRVVYETREHHRERKRLKFTKDVDSKIRNDRESMEKELGFGISCKNSKVQEYTEFQLKWFDEKQKVYEQRRVQRLRFDKYINDQKTNNKIVDEFFGKEPDTLVVYGAGFDFMNKGTFKGHRKFRHNDILKIIKRRANLSLYIINEAFTTKNCSKCYESRVQQKMRVSKSPHRYVYCSVCRKGIHRDKNGAKNILLKFEFKKNTIKSPVILSFAGTDMNVAGGGSS

SEQ ID NO: 4407 - protein, 255 aa, Amphipyra tragopoginis
MKGKGPYASVYRTYFGNRSYDGKLHSFVIQELAKQYETVLYTNVSTHAYARIIAVDPGSRIPLATIESKLGTFVRITKKRVCSHTLEWKRVRIRKKITGPVEAAERADRKPLPFPVSSKNTSHVIEYTVFRMNWFEARQAPYEQHAKLKRLKLDKYIAQAKSEHRIIKEVFDGGGVEKKLVLYGAGNRFMNAASFSGRKFKHAARRNKETAKLAHFDRRRGVNMTGMQRQDWGVCQDRHESSTTLGGLPKLPQRV

SEQ ID NO: 4408 - protein, 288 aa, Amphipyra tragopoginis
MSMNRIVSKGSKFKSKRVKKDEAAIENSNVHSKSYSKIISVDPGAKTPIVTCTRSDDDGFEYRVLKKERVVYESKEQHREKKRSRFIKDIEERVKVDREDTEHETGVSITLKSTDVCDYTRFQLKWFDEKQRVYEQRRLQRLKFDQYINDHKMLHKLVDEFFGKEPDTLVVYGAGFNFMNTGTFKGHRKFRHNDVLKIIRQRKNLSVFIINEAFTTKNCSKCYESGLKNHLHVSKSPHRYVYCSVCRKGIHRDKNGAKNILLKYEYTKSPNSLSSIGTDVDHADGGSS

SEQ ID NO: 4409 - protein, 284 aa, Amphipyra tragopoginis
MSSTKPSASLAEETIISKDLQQNVKIIYRPFERELSSTDNIEVYVVKRGLHSILCPLLSSEEKTKLLSEIRRDVCDLSRVYIELGVWLNLYMKTAPVLPSKLDILNFIYAMKGKGPYASAYRTYFGNRSYDGKLRSFVIQELAKQYETVLYTNVSTHAYARQAPYEQHAKLTRLKLEKYLAQAKSEHHIIKEVFGGGGVEMKLVLYGTGSRFMNAASFSGRKFKHDSLLAKMRRRPNLHVLIVDEAYTSQACSTCNDKTGETNCQDLHESSTTLGGLPKLPQRV

SEQ ID NO: 4410 - protein, 296 aa, Lysandra coridon
MNRLVSKDDKILCKAKRVKREETLNENENQMYKNYKKIIAVDPGAKTPIVTCSRRSGDGGGGGFEYKTLKKQRVVYETREHHRERKRSKFIKDVYSKIRNDRESTEKELGFGISCKNSKVQEYTEFQLKWFDEKQKVYEQRRLQRLRFDKYINDQKTNHKIVDDYFGKEPDTLVVYGAGFDFMNKGTFKGHRKFRHNDILKIIKRRPNLSLYIINEAFTTKNCSKCYESGVQQKLQVSKSPHRYVYCSVCRKGIHRDKNGAKNILLKFEFKKNTIKSPVILSFAGTDMNVAGGGSS

SEQ ID NO: 4411 - protein, 614 aa, Lysandra coridon
MPCKACGKDDHSRSSSSKCLNRKRRVRKTELEPDKEISVYCIKKGLGSFVCPLYERRQRLLETIRSDVRELSRLSIELSYLVNYFFKNYYNHKDFHLLFPKFDPLQFTYALKGKNHKLPDPLDIIEKYKLLNKTVIYNGTLRSFNLMWIANQYKTILETNVTAHAFRRLKKYMYHKFAEKLTKSQIHESTFNAFYKNVHGDNDEIGNWFKSNKITEKELKQNFWKYIPLFVKIQHELYENDTKSFNVFPIYKHGLKHISYDSRCLHELLRRVDKENTPSTWVQFSENDPKQYWKRYFSVPKKSFGWSFSTDGVCVSLSMNRLVSKDDKILCKAKRVKREDTLNENENQMYKNYKKIIAVDPGAKTPIVTCSRRSGDGGGDGFEYKTLKKQRVVYETREHHRERKRSKFIKDIDSKIRNDRESTEKELGFGISCKNSKVQEYTEFQLKWFDEKQKVYEQRRLQRLRFDKYINDQKTNHKIVDDYFGKEPDTLVVYGAGFDFMNKGTFKGHRKFRHNDILKIIKRRPNLSLYIINEAFTTKNCSKCYESGVQQKLQVSKSPHRYVYCSVCRKGIHRDKNGAKNILLKFEFKKNTIKSPVILSFAGTDMNVAGGGSS

SEQ ID NO: 4412 - protein, 586 aa, Lysandra coridon
MPCKACGKDDHSRSSSSKCLNRKRRVRETELEPDKEISVYCIKKGLGSFVCPLYERRQRLLETIRLDVRELSRLSIELSYLVNYFFKNYYNHKDFHLLFPKFDPLQFTYALKGKNHKLPDPLDIIEKYKLLNKTVTYNGTLRSFNLMWIANQYKTILETNVTVHAFRRLKKYMHHKFAEKLTKSQIHESTFNAFYKNVHGDNDEIGNSFKSNKITEKELKQNFWKYIPLFVKIQHELYENDTKSFNVFPIYKHGLKHISCDSRCLHELLRRVDKENTPSTWVQFSENDPKQYWKRYFSVPKKSFGWSFSTDGVCVSLSMNRLVSKDDKILFDPGAKTPIVTCSRRSGDGGGGGFEYKTLKKQRVVYETREHHRERKRSKFIKDVDSKIRNDRESTEKELGFGISCKNSKVQEYTEFQLKWFDEKQKVCEQRRLQRLRFDKYINDQKTNHKIVDDYFGKELDTLVVYGAGFDFMNKGTFKGHSKFRHNDILKIIKRRPNLSLYIINEAFTTKNCSKCYESGVQQKLQVSKSPHRYVYCSVCRKGIHGDKNGAKNILLKFEFKKNTIKSPVILSFAGTDMNVAGGGSS

SEQ ID NO: 4413 - protein, 380 aa, Lycaena phlaeas
MVKVGNIKKLKMFTEDLDAELGTGRKGKLELYENDSKSFNVFPIYKHGLKHITYDSRCLQELLRRVDKENTPFTWVQFSENDPTQYWRQYFSISKKSFGWSFSTDGVCVSLSMNRVISKEDKHKIDLGAKTPIVTCKRNSNNFEFKTLKKQRVVYETKEHHRQRKRLKLIKDIDLKIRNDRESLERETGGVGISCKNSKVQEYAKFQLKWFDEKQKVYEQRRLQRFRFDKYMHDQKTNHKTVDEFFAQLRLPISEMRERSRRSTPTSRDRQLSCWSLTGSRECFRLTARKIGAKASSCGNQPDLKYQVCSHPSTTIGKAAAKNKASKIRMARQRTGGGQSDDISLSVIEQRIVSLMGGDGFTSGDRVLEINPHHVGWRTQ

SEQ ID NO: 4414 - protein, 614 aa, Lysandra bellargus
MPCKACGKDDHSRSSSSKCLNRKRRVRKTELEPDKEISVYCIKKGLGSFVCPLYERRQRLLETIRSDVRELSRLSIELSYLVNYFFKNYYNHKDFHLLFPKFDPLQFTYALKGKNHKLPDPLDIIEKYKLLNKTVIYNGTLRSFNLMWIANQYKTILETNVTAHAFRRLKKYMYHKFAEKLTKSQIHESTFNAFYKNVHGDNDEIGNWFKSNKITEKELKQNFWKYIPLFVKIQHELYENDTKSFNVFPIYKHGLKHISYDSRCLHELLRRVDKENTPSTWVQFSENDPKQYWKRYFSVPKKSFGWSFSTDGVCVSLSMNRLVSKDDKILCKAKRVKREDTLNENENQMYKNYKKNIAVDPGAKTPIVTCSRRSGDGGGDGFEYKTLKKQRVVYETREHHRERKRSKFIKDIDSKIRNDRESTEKELGFGISCKNSKVQEYTEFQLKWFDEKQKVYEQRRLQRLRFDKYINDQKTNHKIVDDYFGKEPDTLVVYGAGFDFMNKGTFKGHRKFRHNDILKIIKRRPNLSLYIINEAFTTKNCSKCYESGVQQKLQVSKSPHRYVYCSVCRKGIHRDKNGAKNILLKFEFKKNTIKSPVILSFAGTDMNVAGGGSS

SEQ ID NO: 4415 - protein, 611 aa, Lysandra bellargus
MPCKACGKDDHSRSSSSKCLNRKRRVRKTELEPDKEISVYCIKKGLGSFVCPLYERRQRLLETIRSDVRELSRLSIELVNYFFKNYYNHKDFHLLFPKFDPLQFTYALKGKNHKLPDPLDIIEKYKLLNKTVIYNGTLRSFNLMWIANQYKTILETNVTAHAFRRLKKYMYHKFAEKLTKSQIHESTFNAFYKNVHGDNDEIGNWFKSNKITEKELKQNFWKYIPLFVKIQHELYENDTKSFNVFPIYKHGLKHISYDSRCLHELLRRVDKENTPSTWVQFSENDPKQYWKRYFSVPKKSFGWSFSTDGVCVSLSMNRLVSKDDKILCKAKRVKREDTLNENENQMYKNYKKNIAVDPGAKTPIVTCSRRSGDGGGDGFEYKTLKKQRVVYETREHHRERKRSKFIKDIDSKIRNDRESTEKELGFGISCKNSKVQEYTEFQLKWFDEKQKVYEQRRLQRLRFDKYINDQKTNHKIVDDYFGKEPDTLVVYGAGFDFMNKGTFKGHRKFRHNDILKIIKRRPNLSLYIINEAFTTKNCSKCYESGVQQKLQVSKSPHRYVYCSVCRKGIHRDKNGAKNILLKFEFKKNTIKSPVILSFAGTDMNVAGGGSS

SEQ ID NO: 4416 - protein, 614 aa, Lysandra bellargus
MPCKACGKDDHSRSSISKCLNRKRRVRKTELEPDKEISVYCIKKGLGSFVCPLYERRQRLLETIRSDVRELSRLSIELSYLVNYFFKNYYNHKDFHLLFPKFDPLQFTYALKGKNHKLPDPLDIIEKYKLLNKTVIYNGTLRSFNLMWIANQYKTILETNVTAHAFRRLKKYMYHKFAEKLTKSQIHESTFNAFYKNVHGDNDEIGNWFKSNKITEKELKQNFWKYIPLFVKIQDELYENDTKSFNVFPIYKHGLKHISYDSRCLHELLRRVDKENTTSTWVQFSENDPKQYWKRYFSVPKKSFGWSFSTDGVCVSLSMNRLVSKDDKILCKAKRVKREDTLNENENQMYKNYKKIIAVDPGAKTPIVTCSRRSGDGGGDGFEYKTLKKQRVVYETREHHRERKRSKFIKDIDSKIRNDRESTEKELGFGISCKNSKVQEYTEFQLKWFDEKQKVYEQRRLQRLRLDKYINDQKTNHKIVDDYFGKEPDTLVVYGAGFDFMNKGTFKGHRKFRHNDILKIIKRRPNLSLYIINEAFTTKNCSKCYESGVQQKLQVSKSPHRYVYCSVCRKGIHRDKNGAKNILLKFEFKKNTIKSPVILSFAGTDMNVAGGGSS

SEQ ID NO: 4417 - protein, 266 aa, Lysandra bellargus
MYKNYKKIIAVDPGAKTPIVTCSRRSGDGGGDGFEYKTLKKQRVVYETHEHHRERKRSKFIKDIDSKIRNDRESTEKELGFGISCKNSKVQEYTEFQLKWFDEKQKVYEQRRLQRLRFDKYINDQKTNHKIVDDYFGKEPDTLVVYGAGFDFMNKGTFKGHRKFRHNDILKIIKRRPNLSLYIINEAFTTKNCSKCYESGVQQKLQVSKSPHRYVYCSVCRKGIHRDKNGAKNILLKFEFKKNTIKSPVILSFAGTDMNVAGGGSS

SEQ ID NO: 4418 - protein, 614 aa, Lysandra bellargus
MPCKACGKDDHSRSSSSKCLNRKRRVRKTELEPDKEISVYCIKKGLGSFVCPLYERRQRLLETIRSDVRELSRLSIELSYLVNYFFKNYYNHKDFHLLFPKFDPLQFTYALKGKNHKLPDPLDIIEKYKLLNKTVIYNGTLRSFNLMWIANQYKTILETNVTAHAFRRLKKYMYHKFAEKLTKSQIHESTFNAFYKNVHGDNDEIGNWFKSNKITEKELKQNFWKYIPLFVKIQHELYENDTKSFNVFPIYKHGLKHISYDSRCLHELLRRVDKENTPSTWVQFSENDPKQYWKRYFSVPKKSFGWSFSTDGVCVSLSMSRLVSKDDKILCKAKRVKREDTLNENENQMYKNYKKIIAVDPGAKTPIVTCSRRSGDGGGDGFEYKTLKKQRVVYETREHHRERKRSKFIKDIDSKIRNDRESTEKELGFGISCKNSKVQEYTEFQLKWFDEKQKVYEQRRLQRLRFDKYINDQKTNHKIVDDYFGKEPDTLVVYGAGFDFMNKGTFKGHRKFRHNDILKIIKRRPNLSLYIINEAFTTKNCSKCYESGVQQKLQVSKSPHRYVYCSVCRKGIHRDKNGAKNILLKFEFKKNTIKSPVILSFAGPDMNVAGGGSS

SEQ ID NO: 4419 - protein, 614 aa, Lysandra bellargus
MPCKACGKDDHSRSSSSKCLNRKRRVRKTELEPDKEISVYCIKKGLGSFVCPLYERRQRLLETIRSDVRELSRLSIELSYLVNYFFKNYYNHKDFHLLFPKFDPLQFTYALKGKNHKLPDPLDIIEKYKLLNKTVIYNGTLRSFNLMWIANQYKTILETNVTAHAFRRLKKYMYNKFAEKLTKSQIHESTFNAFYKNVHGDNDEIGNWFKSNKITEKELKQNFWKYIPLFVKIQHELYENDTKSFNVFPIYKHGLKHISYDSRCLHELLRRVDKENTPSTWVQFSENDPKQYWKRYFSVPKKSFGWSFSTDGVCVSLSMNRLVSKDDKILCKAKRVKREDTLNENENQMYKNYKKIIAVDPGAKTPIVTCSRRSGDGGGDGFEYKTLKKQRVVYETREHHRERKRSKFIKDIDSKIRNDRESTEKELGFGISCKNSKVQEYTEFQLKWFDEKQKVYEQRRLQRLRFDKYINDQKTNHKIVDDYFGKEPDTLVVYGAGFDFMNKGTFKGHRKFRHNDILKIIKRRPNLSLYIINEAFTTKNCSKCYESGVQQKLQVSKSPHRYVYCSVCRKGIHRDKNGAKNILLKFEFKKNTIKSPVILSFAGTDMNVAGGGSS

SEQ ID NO: 4420 - protein, 359 aa, Atethmia centrago
MRRVCTIINVDTVGGTKWWTTIREWLKIQEKLKDFRLFPQPSHGLKHLTYTSRGWHELWRRVDPKSITCYWTRIVNHRRELWWPSLDVDMKKFGCSIQTDGISVSLSMNRIKKNSNPKKRPKKTYDRIIAVDPGSRIPVAALDSKRLQFRRITKKYVRSHTLEWKRQRIRNKLCRVSEEAEQKAREKLTFPVSSKNTSHVVEYTVFRMMWFDVRQEPYEKHAKLTRLGLDKYLRTAKCEEKIIKEVFDGGGVESTLVLYGAGSKFMNTASFSGRKFKHDSLIKRLRSKRNIDVEVVDEKYTSQACSSCNAKTGEFHKIVMNHRLRWGVCRNCNSEFDRDANAAKNILIINYFNRLTCLP

SEQ ID NO: 4421 - protein, 259 aa, Atethmia centrago
MNRIKKNSNPKKRPKKTYDRIIAVDPGSRIPVAALDSKRLQFRRITKKYVRSHTLEWKRRRIRNKLCRVSEEAEQKAREKLTFPVSSKNTSHVVEYTVFRMMWFDVRQEPYEKHAKLTRLGLDKYLRTAKCDEKIIKEVFDGGGVESTLVLYGAGSKFMNTASFSGRKFKHDSLIKRLRSKRNIDVEVVDEKYTSQACSSCNAKTGEFHKIVMNHRLRWGVCRNCNSEFDRDANAAKNILINYTRSTICRPGCSTSGAS

SEQ ID NO: 4422 - protein, 551 aa, Abrostola tripartita
MATCKTCGGSDHTRTSSKKCKNYLPPIRKRHLSESKELEIYTVKRGLASCLCPLLAPEKKLELLTEIRRDVCDLSRVYIELGVWYNYYMKTSAQLPPKPDVLNFIYAMKGKGPYSSAYASMFGARKFDDKLRSFMVQEMAKQYETVLHTNISTHAYSRLARYFNVKRNDPALFSAFFKKTLPDDNEEMRRVCSIINVDTVGGSKWWSTVPEWLKIQSKLEDFRLFPQPSHGLKHITYTSRGWHELLRRVDPKSITSIWSRIEDHRRELWAPWLDVDMKKFGCSLQTDGYSVSLSMNRIKREPNMRKRAKKSYDRIIAVDPGSRIPVAAVESRRLKFQRITKKYVRSHTLEWKRARVRNKLCRVSEEAEQKAREKLNFPVSSKNTTHVVEYTVFRMHWFNVRQEPYERHAKLTRLKLDKFIRTAKCEEKIIKEIFDDSSNTLVLYGAGSTFMNKASFSGRKFKHDSLIKRLRSKPNIDVEIVDEQYTSQACSSCNASTGEFHKIVMNHRLRWGVCPNCNSEFDRDSNAAKNILINYTRSTLCRPGCSTNGAS

SEQ ID NO: 4423 - protein, 551 aa, Abrostola tripartita
MATCKTCGGSDHTRTSSKKCKNYLPPIRKRHLSESKELEIYTVKRGLASCLCPLLAPEKKLELLTEIRRDVCDLSRVCIELGVWYNYYMKTSAQLPPKPDVLNFIYAMKGKGPYSSAYASMFGARKFDDKLRSFMVQEMAKQYETVLHTNISTHAYSRLARYFNVKRNDPALFSAFFKKTLPDDNEEMRRVCSIINVDTVGGSKWWSTVPEWLKIQSKLEDFRLFPQPSHGLKHITYTSRGWHELLRRVDPKSITSIWSRIEDHRRELWAPWLDVDMKKFGCSLQTDGYSVSLSMNRIKREPNMRKRAKKSYDRIIAVDPGSRIPVAAVESRRLKFQRITKKYVRSHTLEWKRARVRNKLCRVSEEAEQKAREKLNFPVSSKNTTHVVEYTVFRMHWFNVRQEPYERHAKLTRLKLDKFIRTAKCEEKIIKEIFDDSSNTLVLYGAGSTFMNKASFSGRKFKHDSLIKRLRSKPNIDVEIVDEQYTSQACSSCNASTGEFHKIVMNHRLRWGVCPNCNSEFDRDSNAAKNILINYTRSTLCRPGCSTNGAS

SEQ ID NO: 4424 - protein, 586 aa, Glaucopsyche alexis
MRKSLIPSESDKVPIPSSMFIVMGGGGGGCCKTCGGTDHTRRSSKKCKDYLPPIRKRKLSNGEDLEIYNVKRGLESVLCPLLEREKKQRLLSEIRRDVFDLSRVYVRLGVWINHHVKTSPAGIAKLDILNFVYAMKGKGPYAEAYRSVFGRDSYYDGKLRSFVIFELAKQYETVLHTNISTHTYARLARYFKVKRNDPTLYDAYFKKKLPNDNHHEEIRRVCSVINVDSVKSSFGWWKTLPLWLEIQETLQDFRLFPQPTHGLKHITYTSNGWHELIRRVDPPSLPSVWSKITDHIAELWSPWLSIDTRKFGCCIQTDGVSVSLSMNRRRRRSQSKVKRSKQSYDRIIAVDPGSRLPVATVESKFRHFQRVTRKYVRSHTLEWKRERTRNKLLRNVELAEQKDRETHEKPPSSKNVSRVQEYTAFRIKWFDARQEPFERHSKLTRLALDRYIRSAKCEERIIKEVFGTVENTLVLYGAGSKFMNTATFSGRKFKHDSLIKRLRSKRNITVEIVDEAYTSQACSTCNQNTGRFHKIVMNHRLRRGVCPNCRGESDRDENAARNILINYTRSTICRPGCLSAAAAATS

SEQ ID NO: 4425 - protein, 452 aa, Glaucopsyche alexis
MKGKGPYAEAYRSVFGRDSYYDGKLRLFVIFELAKQYETVLHTNISTHTYARLARYFKVKRNDPTLYDAYFKKKLPNDNHHEEIRRVCSVINVDSVKSSFGWWKTLPLWLEIQETLQDFRLFPQPTHGLKHITYTSNGWHELIRRVDPPSLPSVWSKITDHMAELWSPWLSIDTRKFGCCIQTDGVSVSLSMNRRRRRSQSKVKRSKQSYDRIIAVDPGSRLPVATVESKFGHFQRVTRKYVRSHTLEWKRERMRNKLLRDVELAEQKDRETHEKPPSSKNVSRVQEYTAFRIKWFDARQEPFERHSKLTRLALDRYIRSAKCEERIIKEVFGTVENTLVLYGAGSKFMNTATFSGRKFKHDSLIKRLRSKRNITVEIVDEAYTSQACSTCNQNTGGFHKIVMNHRLRRGVCPNCRGESDRDENAARNILINYTRSTICRPGCLSAAAAATS

SEQ ID NO: 4426 - protein, 387 aa, Glaucopsyche alexis
MYDAYFKKKLPNDNHHEEIRRVCSVINVDSVKSSFGWWKTLPLWLEIQETLQDFRLFPQPTHGLKHITYTSKGWHELIRRVDPPSLPSVWSKITDHMAELWSPWLSIDTRKFGCCIQTDGVSVSLSMNRRRRRSQSKVKRSKQSYDRIIAVDTGSRLPVATVESKFGHFQRVTRKYVRSHTLEWKRERTRNKLLRDVELAEQKDRETHEKPPSSKNVSRVQEYTAFRIKWFDARQEPFERHSKLTRLALDRYIRSAKCEERIIKEVFGTVENTLVLYGAGSKFMNTATFSGRKFKHDSLIKRLRSKRNITVEIVDEAYTSQACSTCNQNTGGFHKIVMNHRLRRGVCPNCRGESDRDENAARNILINYTRSTICRPGCLSAAAAATS

SEQ ID NO: 4427 - protein, 499 aa, Plebejus argus
MPCKACGKDDHSRSSSSKCSNRKRRVRETELEPDEEISVYCIKKGLGSFVCPLYEKRQSLLETIRSDVRELSRLSIELSYLVNYFFKNYYNHKDFHLLFPKFDPLQFTYALKCKNHKLPDPLDIIEKYKLLNKNVTYNGTLRSFNLMWIANQYKTILETNVTVHAFRRLKKYMYHKFAEKLTKSQIHESTFNAFYKNVHGDNDEIGNWFESNKITEKELKQNFWKYIPLFVRIQHELYENDTKSFNVFPIYKHGLKHISYDSRCLHELLRRVDKENTPSTWAQFSENDPKQYWRRCFSVPKKSFGWSFSTDGICVSLSMNRLVNKEDKCKAKRVKREETLNENENQMYKNYKKIIAVDPGAKTPIVTCSRSVDGDGFEYKTLKKQRVVYETREHHRERKRLKFIKDVDSKIRNDRESTEKELGFGITCKNSKVQEYTEFQLKWFDKKQKVYEQRRLQRLRFDKYINDQKTNHKIVDEFFGMEPDTLVVYGAGRPVSLRA

SEQ ID NO: 4428 - protein, 609 aa, Plebejus argus
MPCKACGKDDHSRSSSSKCSNRKRRVRETELEPDEEISVYCIKKGLGSFVCPLYEKRQSLLETIRSDVRELSRLSIELSYLVNYFFKNYYNHKDFHLLFPKFDPLQFTYALKCKNHKLPDPLDIIEKYKLLNKNVTYNGTLRSFNLMWIANQYKTILETNVTVHAFRRLKKYMYHKFAEKLTKSQIHESTFNAFYKNVHGDNDEIGNWFESNKITEKELKQNFWKYIPLFVRIQHELYENDTKSFNVFPIYKHGLKHISYDSRCLHELLRRVDKENTPSTWAQFSENDPKQYWRRCFSVPKKSFGWSFSTDGICVSLSMNRLVSKEDKCKAKRVKREETLNENENQMYKNYKKIIAVDPGAKTPIVTCSRSVDGDGFEYKTLKKQRVVYETREHHRERKRLKFIKDVDSKIRNDRESTEKELGFGITCKNSKVQEYTEFQLKWFDKKQKVYEQRRLQRLRFDKYINDQKTNHKIVDEFFGMEPDTLVVYGAGFDFMNKGTFKGHRKFRHNDILKIIKRRANLSLYIINEAFTTKNCSKCYESGVQQKLQVSKSPHRYVYCSVCRKGIHRDKNGAKNILLKFELKKKTIKSPVILSFAGTDVNVAGGGSS

SEQ ID NO: 4429 - protein, 382 aa, Plebejus argus
MWIANQYKTILETNVTVHAFKRLKRYMHHKFSEQLTKSQIHESTFNAFYKNVHSDNNEIGNWFKVNKITEKELKQNFWKYIPLFVKIQHELYENDTKSFLFPIYKHGLKHITYDSRCLYELLRRVDKENTPSNWVQFSENDPKPYWRRCFSIPKKSFGWSMSTDGVCVSLSMNRLVRKEDKLKAKRVKREEASNEHENQMYKNYKKIIAVDPGAKTPIVTCSRSGDDGGGFEYKTLKKQRVVYETREHHRQRKRLKFIKDVDLKIKNDRESLEKELGIGISCKNSNVREYTKFQLKWFDEKQKVYEQRRLQRLRFDKYINDQKTNHKIVDEYFGKEPNTLVVYGAGFDFMNKGTFKGHRKFRHNDILKIIKQRKTFILVYNQ

SEQ ID NO: 4430 - protein, 557 aa, Autographa pulchrina
MSISCKTCGGLDHTRKSSKKCKEYLPPIRKRTFDPGVELEVYTIKRGLSSIICPLLEQEKRLKLLSEIRRDVRDLSRVYIELGVWINYYLKTSPVLPSKPDVLNFLYAMKGKGPYSESYRTMFGDRKYNDKLRSFVVQEMAKQYETTIHTNIETHAYARLARYFNVKRNNPELFNAFFKKILPENHEEMTRICSLINVDTLKSKWWATIPEWLRIQEQLQDFRLFPQPSHGLKHITYTSRGWHELLRRVDPSSITSIWARIENHMQELWSLWLEVDTKRFGCCLQTDGVSVSLSMNRLINKNKTCLSLEKRKKPSYDRIIAVDPGSRLPVAAVESTRGQFKRITRKYVRSHTLEWKRERIRTKLCSTSERAEQRAREQFNFPVSSKYTSHVIEYTVFRLTWFNVRQEPYELHSKLTRLRLDKYIRTAICEERIIKEVFDAGGIEKKKILYGAGSKFMNKATFSGRKFKHDSLIRRLRSKRNIDVEIVDEQYTSQACSACNEKMGAFHKIVMNHRLRWGVCPNCRNEFDRDANAARNILINYTRSTICRPGCSTNGAS

SEQ ID NO: 4431 - protein, 557 aa, Autographa pulchrina
MSISCKTCGGLDHTRKSSKKCKEYLPPIRKRTFDPGVELEVYTIKRGLSSIICPLLEQEKRLKLLSEIRRDVRDLSRVYIELGVWINYYLKTSPVLPSKPDVLNFLYAMKGKGPYSESYRTMFGDRKYNDKLRSFVVQEMAKQYETTIHTNIETHAYARLARYFNVKRNNPELFNAFFKKILPENHEEMTRICSLINVDTLKSKWWATIPEWLCIQEQLQDFRLFPQPSHGLKHITYTSRGWHELLRRVDPSSITSIWARIENHMQELWSLWLEVDTKRFGCCLQTDGVSVSLSMNRLINKNKTCLSLEKRKKPSYDRIIAVDPGSRLPVAAVESTRGQFKRITRKYVRSHTLEWKRERIRTKLCSTSERAEQRAREQFNFPVSSKYTSHVIEYTVFRLTWFNVRQEPYELHSKLTRLRLDKYIRTAICEERIIKEVFDAGGIEKKKILYGAGSKFMNKATFSGRKFKHDSLIRRLRSKRNIDVEIVDEQYTSQACSACNEKMGAFLIIVMNHRLRWGVCPNCRNEFDRDANAARNILINYTRSTICRPGCSTNGAS

SEQ ID NO: 4432 - protein, 307 aa, Ochropleura plecta
MNELYENNKKSFNVFPIYKHGLKHITYDSRCLHELLRRVDAENTPSTWVKFSESDPKKYWRRYFSLPKNFGWSFNTDGVCVSLSMNRLIVKNDKHKAKRLNKKETLNENENQLYKKYKKIIAVDPGAKTPIVTCNRNSSNDTFEYKTLKKGRVVCETNEHRNDHREKKRLKFTKDVDLKIRNDRESLEKELGFIISCKNSNVEDYTKFQLKWLDEKQKIYEQRRLQRLKFDKYINDQKINHKIVDEYFGKERDTLVVYGAGFDFMNKGTFKGHRKFRHNDILKIIKQRKNLSLYIINEAFTTKNCSK

SEQ ID NO: 4433 - protein, 571 aa, Hemaris fuciformis
MSCKSCGGADHQRRSSKLCKNYLAPIRKRGAEDELSVVEVYAVKRGLRAALCPLLDAPTTMRLLGEIRSDVVELSRLYIRLGVFVDFYFKTVDRNASLKSFQDMMNFVYALKSKGPYAEAYSRMVEGHDVRPYDGRHRSYIIQELAKQYWTVLKTNVTTHAYSRLVRYFKVKRNDRRLFEAFFQKRYTADDDELNSVCRLINVDSPWYATIPEWLRIQDAMIGRGDASFVIFPQPSHGLKHVTYTSKGWHELLRRVSPRTIASDWKKIEDHRKELWAPYFDSKTIDMKKFGCTVQTDGRSVSLSMTRRVKNISSVATKRPKASYDRTIAVDPGSRVPIAACDDRYGFKRITKKWIRSHTLEWKRDRVRKRLLAYIETAERLDRERIEKELGVVLTPKGGTNAAHYASFRLKWFESRQKPFETYSKLTRLKFDKYVNAARTNEKIVREVFLSDAPSDRVLVLYGAGYKFMNRATFSGRKFRHDDLLKRLRARRNITVETVDEAYTSKACSACNARDGSFHRLKIDHRLRRGVCPDCNGAPLDRDYNAARNILVNHTRSTVCRPSCTVANGAA

SEQ ID NO: 4434 - protein, 571 aa, Hemaris fuciformis
MSCKSCGGADHQRRSSKLCKNYLAPIRKRGAEDELSVVEVFAVKRGLRAALCSLLDAPTTMRLLGEIRSDVVELSRLYIRLGVFVDFYFKTVDRNASLKSFQDMMNFVYALKSKGPYAEAYSRMVEGHDVRPYDGRHRSYIIQELAKQYWTVLKTNVTTHAYSRLVRYFKVKRNDRRLFEAFFQKRYTADDDELNSVCRLINVDSPWYATIPEWLRIQDAMIGRGDASFVIFPQPSHGLKHVTYTSKGWHELLRRVSPRTIASDWKKIEDHRKELWAPYFDSKTIDMKKFGCTVQTDGRSVSLSMTRRVKNISSVATKRPKASYDRTIAVDPGSRVPIAACDDRYGFKRITKKWIRSHTLEWKRDRVRKRLLAYIETAERLDRERIEKELGVVLTPKGGTNAAHYASFRLKWFESRQKPFETHSKLTRLKFDKYVNAARTNEKIVREVFLSDAPSDRVLVLYGAGYKFMNRATFSGRKFRHDDLLKRLRARRNITVETVDEAYTSKACSACNARDGSFHRLKIDHRLRRGVCPDCNGAPLDRDYNAARNILVNHTRSTVCRPSCTVANGAA

SEQ ID NO: 4435 - protein, 571 aa, Hemaris fuciformis
MSCKSCGGADHQRRSSKLCKNYLAPIRKRGAEDELSVVEVYAVKRGLRAALCPLLDAPTTMRLLGEIRSDVVELSRLYIRLGVFVDFYFKTVDRNASLKSFQDMMNFVYALKSKGPYAEAYSRMVEGHDVRPYDGRHRSYIIQELAKQYWTVLKTNVTTHAYSRLVRYFKVKRNDRRLFEAFFQKRYTADEDELNSVCRLINVDSPWYATIPEWLRIQDAMIGRGDASFVIFPQPSHGLKHVTYTSKGWHELLRRVSPRTIASDWKKIEDHRKELWAPYFDSKTIDMKKFGCTVQTDGRSVSLSMTRRVKNISSVATKRPKASYDRTIAVDPGSRVPIAACDDRYGFKRITKKWIRSHTLEWKRDRVRKRLLAYIETAERLDRERIEKELGVVLTPKGGTNAAHYASFRLKWFESRQKPFETHSKLTRLKFDKYVNAARTNEKIVREVFLSDAPSDRVLVLYGAGYKFMNRATFSGRKFRHDDLLKRLRARRNITVETVDEAYTSKACSACNARDGSFHRLKIDHRLRRGVCPDCNGAPLDRDYNAARNILVNHTRSTVCRPSCTVANGAA

SEQ ID NO: 4436 - protein, 571 aa, Hemaris fuciformis
MSCKSCGGADHQRRSSKLCKNYLAPIRKRGAEDELSVVEVYAVKRGLRAALCPLLDAPTIMRLLGEIRSDVVELSRLYIRLGVFVDFYFKTVDRNASLKSFQDMMNFVYALKSKGPYAEAYSRMVEGHDVRPYDGRHRSYIIQELAKQYWTVLKTNVTTHAYSRLVRYFKVKRNDRRLFEAFFQKRYTADEDELNSVCRLINVDSPWYATIPEWLRIQDAMIGRGDASFVIFPQPSHGLKHVTYTSKGWHELLRRVSPRTIASDWKKIEDHRKELWAPYFDSKTIDMKKFGCTVQTDGRSVSLSMTRRVKNISSVATKRPKASYDRTIAVDPGSRVPIAACDDRYGFKRITKKWIRSHTLEWKRDRVRKRLLAYIETAERLDRERIEKELGVVLTPKGGTNAAHYASFRLKWFECRQKPFETHSKLTRLKFDKYVNAARTNEKIVREVFLSDAPSDRVLVLYGAGYKFMNRATFSGRKFRHDDLLKRLRARRNITVETVDEAYTSKACSACNARDGSFHRLKIDHRLRRGVCPDCNGAPLDRDYNAARNILVNHTRSTVCRPSCTVANGAA

SEQ ID NO: 4437 - protein, 416 aa, Hemaris fuciformis
MLVKWLVRYFKVKRNDRRLFEAFFQKRYTADEDELNSVCRLINVDSPWYATIPEWLRIQDAMIGRGDASFVIFPQPSHGLKHVTYTSKGWHELLRRVSPRTIALDWKKIEDHRKELWAPYFDSKTIDMKKFGCTVQTDGRSVSLSMTRRVKNISSVATKRPKASYDRTIAVDPGSRVPIAACDDRYGFKRITKKWIRSHTLEWKRDRVRKRLLAYRETAERLDRERIEKELGVVLTPKGGTNAAHYASFRLKRFESRHKPFETHSKLTRLKFDKYVNAARTNEKIIREVFLSDAPSDRVLVLYGAGYKFMNRATFSGRKFRHDDLLKRLRARRNITVETVDEAYTSKACSACNARDGSFHRLKIDHRLRRGVCPDCNGAPLDRDYNAARNILVNHTRSTKLHRRERRSVTSAQREK

SEQ ID NO: 4438 - protein, 571 aa, Hemaris fuciformis
MSCKSCGGADHQRRSSKLCKNYLAPIRKRGAEDELSVVEVYAVKRGLRAALCPLLDAPTTMRLLGEIRSDVVELSRLYIRLGVFVDFYFKTVDRNASLKSFQDMMNFVYALKSKGPYAEAYSRMVEGHDVRPYDGRHRSYIIQELAKQYWTVLKTNVTTYAYSRLVRYFKVKRNDRRLFEAFFQKRYTADDDELNSVCRLINVDSPWYATIPEWLRIQDAMIGRGDASFVIFPQPSHGLKHVTYTSKGWHELLRRVSPRTIASDWKKIEDHRKELWAPYLDSKTIDMKKFGCTVQTDGRSVSLSMTRRVKNISSVATKRPKASYDRTIAVDPGSRVPIAACDDRYGFKRITKKWIRSHTLEWKRDRVRKRLLAYIETAERLDRERIEKELGVVLTPKGGTNAAHYASFRLKWFESRQKPFETHSKLTRLKFDKYVNAARTNEKIVREVFLSDAPSDRVLVLYGAGYKFMNRATFSGRKFRHDDLLKRLRARRNITVETVDEAYTSKACSACNARDGSFHRLKIDHRLRRGVCPDCNGAPLDRDYNAARNILVNHTRSTVCRPSCTVANGAA

SEQ ID NO: 4439 - protein, 571 aa, Hemaris fuciformis
MSCKSCGGADHQRRSSKLCKNYLAPIRKRGAEDELSVVEVYAVKRGLRAALCPLLDAPTTMRLLGEIRSDVVELSRLYIRLGVFVDFYFKTVDRNASLKSFQDMMNFVYALKSKGPYAEAYSRMVEGHDVRPYDGRHRSYIIQELTKQYWTVLKTNVTTHAYSRLVRYFKVKRNDRRLFEAFFQKRYTADEDELNSVCRLINVDSPWYATIPEWLRIQDAMIGRGDASFVIFPQPSHGLKHVTYTSKGWHELLRRVSPRTIASDWKKIEDHRKELWAPYFDSKTIDMKKFGCTVQTDGRSVSLSMTRRVKNISSVATKRPKASYDRTIAVDPGSRVPIAACDDRYGFKRITKKWIRSHTLEWKRDRVRKRLLAYIETAERLDRERIEKELGVVLTPKGGTNAAHYASFRLKWFESRQKPFETHSKLTRLKFDKYVNAARTNEKIVREVFLSDAPSDRVLVLYGAGYKFMNRATFSGRKFRHDDLLKRLRARRNITVETVDEAYTSKACSACNARDGSFHRLKIDHRLRRGVCPDCNGAPLDRDYNAARNILVNHTRSTVCRPSCTVANGAA

SEQ ID NO: 4440 - protein, 571 aa, Hemaris fuciformis
MSCKSCGGADHQRRSSKLCKNYLAPIRKRGAEDELSVVEVYAVKRGLRAALCPLLDAPTTMRLLGEIRSDVVELSRLYIRLGVFVDFYFKTVDRNASLKSFQDMMNFVYALKSKGPYAEAYSRMVEGHDVRPYDGRHRSYIIQELAKQYWTVLKTNVTTHAYSRLVRYFKVKRNDRRLFEAFFQKRYTADDDELNSVCRLINVDSPWYATIPEWLRIQDAMIGRGDASFVIFPQPSHGLKHVTYTSKGWHELLRRVSPRTIASDWKKIEDHRKELWAPYFDSKTIDMKKFGCTVQTDGRSVSLSMTRRVKNISSVATKRPKASYDRTIAVDPGSRVPIAACDDRYGFKRITKKWIRSHTLEWKRDRVRKRLLAYIETAERLDRERIEKELGVVLTPKGGTNAAHYASFRLKWFESRQKPFETHSKLTRLKFDKYVNAARTNEKIVREVFLSDAPSDRVLVLYGAGYKFMNRATFSGRKFRHDDLLKRLRARRNITVETVDEAYTSKACSACNARDGSFHRLKIDHRLRRGVCPDCNGAPLDRDYNAARNILVNHTRSTVCRPSCTVANGAA

SEQ ID NO: 4441 - protein, 226 aa, Hemaris fuciformis
MTRRVKKISSVATKRPKASYDRTIAVDPGSRVPISACDDRYGFKRITKKWIRSHTLKWKRDRVRKRLLAYSETAERLDRERIEKELGVVLTPKGGTNAAHYASFRLKWFESRQKPFETHSKLTRLKLDKYVNAARTNEKIVRAVFLSDAPSDRVLVLYGAGSKFTNRVTFSGRKFRHDDLLKWLRARRNITVETVDEAYTSKACSACNARDGSFHRLKIDHKLRRG

SEQ ID NO: 4442 - protein, 571 aa, Hemaris fuciformis
MSCKSCGGADHQRRSSKLCKNYLAPIRKRGAEDELSVVEVYAVKRGLRAALCPLLDAPTTMRLLGEIRSDVVELSRLYIRLGVFVDFYFKTVDRNASLKSFQDMMNFVYALKSKGPYAEAYSRMVEGHDVRPYDGRHRSYIIQELAKQYWIVLKTNVTTHAYSRLVRYFKVKRNDRRLFEAFFQKRYTADEDELNSVCRLINVDSPWYATIPEWLRIQDAMIGRGDASFVIFPQPSHGLKHVTYTSKGWHELLRRVSPRTIASDWKKIEDHRKELWAPYFDSKTIDMKKFGCTVQTDGRSVSLSMTRRVKNISSVATKRPKASYDRTIAVDPGSRVPIAACDDRYGLKRITKKWIRSHTLEWKRDRVRKRLLAYIETAERLDRERIEKELGVVLTPKGGTNAAHYASFRLKWFESRQKPFETHSKLTRLKFDKYVNAARTNEKIVREVFLSDAPSDRVLVLYGAGYKFMNRATFSGRKFRHDDLLKRLRARRNITVETVDEAYTSKACSACNARDGSFHRLKIDHRLRRGVCPDCNGAPLDRDYNAARNILVNHTRSTVCRPSCTVANGAA

SEQ ID NO: 4443 - protein, 398 aa, Idaea aversata
MQIAKTYSTILETNVQTHAFKRLKKYMYHKFGTDIDKSEVHTSTYDAFYNGTCKSNNGICEWFTENKITAKELKINFWKFVPLFLKIQQELYEHEKPSFNIFPIYSHGLKFITYDSSCIHELLRRADPNNTPSTWSVFSENTTMYWNRHFTLPNKFGYSFSTDGVSVCLSMNRIVRKDQKFNKSKKAKLFDVVDVDDTKRYSKIIAVDPGAKTPIVTCTRQYYNGDEFSYKILKKERVLYESKEYHRTRKRCRLIKDIEERIRSDREDVERETGFEVTRKSNKVDIYTRFQLKWFDEKQRIYEQRRLQRLKFDKYINDQKMLNKIVDEYFGKQPNTLVVYGSDFDFMNKGTFKGHRKFRHNEILKIIKHRKNLSVFVINEAFTTKNCSYCHDRDRARI

SEQ ID NO: 4444 - protein, 441 aa, Mythimna ferrago
MKATPELPSKPDVLNLLYAMKGKGPYAEVYRGMFGDRRYDDKLRSFVVQEMAKQYETVLHNNVNTYAYVLLAQYFKVKRNDPTLCPDFFKKTLPDNNEEMRRVCSIINVDMVKSSKWWSTIPEWLKVQAKLEDFKLFPQPSHGLKHITYTSRGWQELLRRVDPKSITSYWTRIQNHRRELWSPWLDMDVKKFGCMIQTDGVSVSLSMKRVKKEKFDVKRSKITYDHIIAVDPGSRIPVAAVESKRLCFRRITKKFVRSHTLEWKRERVRKLSFPVSSKNTSHVVEYTVFRMTWFDVRQEPYEKHSKLTRLRLDKYLRSARCEEKIVKEVFDGGGVESIRILYGAGSTFMNTASFSGRKFMNTASFSGRKFMNMASFSGRKFKHDSLIKRLRSKRNIDVEIVDESYTSQACSSCNEKTGEFHKVKMDHKLRLGGLPKLQQRV

SEQ ID NO: 4445 - protein, 336 aa, Chrysoteuchia culmella
MKTSPNLLSEKPDILKYVYAMKNKGPYAEKYREMCNGSCYDGRLRSFVIQELAKSYETVLYTNIETHGYSRLCRYFNVKRNDVRIYDAFFKKQFTENDEISDMCKLINEDILKKSCWKTIPICLKIQKELHERENSKSFNLFPQPSHGLKHVTSHTLEWKRDKERNKLLKESLEAESKDREYIAKQKGIILSAKSTLHVNEYTEFRLKWFDRRQEPYESYRKLTRLNLDKFIRTAKTEEKIIREIFDGGGDAVKVLYGAGSTFMNTANFSSRKFKHNSLLTRIRNKNTKVEVVNESYTSQACSNCNHNYNAAKNILINFTRSAICRPGYRVTNEVS

SEQ ID NO: 4446 - protein, 200 aa, Chrysoteuchia culmella
MNRYIKTKEEPPPPKRLQPSESFKKIVAVDPGSRVPLVTCDSNFQFKRITKNFIRSHTLEWKRDRVRNKLLKESLEAESKDREHIAKEKGIILSAKSTLHVNEYTEFRLKWLDRKQELYESYRKLTRLNLDKFIRTAKTEEKVIREIFDGGGDAVKVLYGAGSTFMNTANFSGRKFKHNSLLIYIRNKNTKVEVESLLKL

SEQ ID NO: 4447 - protein, 565 aa, Cydia splendana
MEKQCKSCGGTDHHRRSSAKCTNYLPPIRKRKLSDGAAQTLDIYVVKRGLCSALCPLLSPQRRSRLLEEIRRDVRDLSRIYIQLGIFYNLYMKTAPALPDIPDVLNFVYAMKGKGPYAESYTRYFGDHRRYDGKLRSFIVQELAKQYETTLRTNITMHAYSRLARYFKVKRNDERLFRAYYSRILPDGDDNTSREIARVCTVINKDTVEGSRWWKTVPEWMRIQQGMETRSFRLFPQPSHGLKHVMYTSTGWFELLRRVAPDTVPGTWNKITDHLSQLWTPWLDVPATKFGCCLQTDGVSVSLSMNRCAKPQMTEKKKKRRVEYDRVIAVDPGSRVPLATVESKRYSFKRVTRKYVRSHTLEWKRDRVRNKLIAPILAEMQKDRESLNFPVSSKNTDHVIEYSVFRMKWFEAMQVPYETHSKLTRLGLDKYIRIAKCEERIVREVFDGGGVSDVLVLYGAGSKFMNTASFSGRKFRHDSLLKRLRSKSNIRVEVVDEAYTSQACSACNQRTGAFQKIGMNHRLRWGVCPTCHSEFDRDENAAKNILLNHIRSTICRPRCLPGRAS

SEQ ID NO: 4448 - protein, 455 aa, Cydia splendana
MKGKGPYAESYTRYFGDHRRYDGKLRSFIVQELAKQYETTLRTNITMHAYSRLARYFKVKRNDERLFRAYYRRILPDGDDNTSREIARVCAVINKDTVEGSRWWKTVPEWMRIQQGMVTRSFRLFPQPSHGLKHVMYTSTGWFELLRRVAPDTVPGTWNKITDHLNQLWTPWLDVPATKFGCCLQTDGVSVSLSMSRCAKPLMTEKKKKRCVEYDRVIAVDPDSREPLATVESKRYSFKRVTSKYVRSHTLEWKRDRVRNKLIAPILAEMQKDRESLNFPVSSKNTDHVIEYTVFRMKWFEAMQVPYETHSKLTRLGLDKYIRIAKCEERIAREVFDGGGLSDVLVLYGAGSKFMNTASFSGRKFRHDSLLKRLRSKSNIRVEIVDESYTSQACSACHQRTGAFQKIGMNHRLRWGVCPTCHSEFDRDENAAKNILINHIRSTICRPRCLPERAS

SEQ ID NO: 4449 - protein, 455 aa, Cydia splendana
MKGKGPYAESYTRYFGDHRRYDGKLRSFIVQELAKQYETTLRTNITMHAYSRLARYFKVKRNDERLFRAYYSRILPDGDDNTSREIARVCAVINKDTVEGSRWWKTVPEWMRIQQGMVTRSFRLFPQPSHGLKHVMYTSTGWFELLRRVAPDTVPGTWNKITDHLNQLWRPWLDVPATKFGCCLQTDSVSVSLSMSRCAKPLMTEKKKKRCVEYDRVIAVDPGSRVPLATVESKRYSFKRVTSKYVRSHTLEWKRDRVRNKLIAPILAEMQKDRESLNFPVSSKNTDHVIEYTVIRMKWFEAMQVPYETHSKLTRLGLDKYIRIAKCEERIAREVFDGGGVSDVLVLYGAGSKFMNTASFSGRKFRHDSLLKRLRSKSNIRVEIVDESYTSQACSACNQRTGAFQKIGMNHRLRWGVCPTCHSEFDRDENAAKNILINHIRSTICRPRCLPGRAS

SEQ ID NO: 4450 - protein, 529 aa, Cydia splendana
MAQRKPWISTSSNAVCAPRCVLFSRLNADPDCSKRSDGTCVTCRASTSNYTYNLYMKTAPALPDIPDVLNFVYTMKGKGPYAESYTRYFGDHRRYDVKLRSFIVQGLAKQYETTLRTNITMHAYSRLARYFKVKRNDERLFRAYYSRILPDGDDNTSREIARVCTVINKDTVEGSRWWKTVPEWMRIQQGMETRSFRLFPQPSHGLKHVMYTSTGWFELLRRVAPDTVPGTWNKITDHLSQLWTPWLDVPATKFGCCLQTDGVSVSLSMNRCAKPQMTEKKKKRRVEYDRVIAVDPGSRVPLATVESKRYSFKRVTRKYVRSHTLEWKRDRVRNKLIAPILAEMQKDRASLNFPVSSKNTDHVIEYSVFRMKWFEAMQVPYETHSKLTRLGLDKYIRIAKCKERIVREVFDGGGVSDVLVLYGAGSKFMNTASFSGRKFRHDSLLKRLRSKSNIRVEIVDEAYTSQACSACNQRTGAFQKIGMNHRLRWGVCPTCHSEFDRDENAAKNILINHIRSTICRPRCLPGRAS

SEQ ID NO: 4451 - protein, 329 aa, Cydia splendana
MIENADYWSCRALEPLRYSRLLRRVAPDTVPGTWNEITDHLSQLWTPWLDVPATKFGCCLQTDGVSVTLSMNRCAKPQMTEKKKRRVEYDRVIAVDPGSRVPLATVESKRYSFKRVTRKYVRSHTLEWKSSVRNKLIAPILAEMQKDRESLNFPVSSKNTDHVIEYSVFRMKWFEAMQVPYETHSKLTRLGLDKYIRIAKCEERIVREVFDGGGVSDVLVLYGAGSKFMNTASFSGRKFRHDSLLKRLRSKSNIRVEIVDEAYTSQACSACNQRTGAFQKIGMNHRLRWGVCPTCHSEFDRDENAAKNILINHIRSTICRPRCLPGRAS

SEQ ID NO: 4452 - protein, 554 aa, Cydia splendana
MTDDSGSSVMEKQCKSCGGTDHHRRSSAKCTNYLPPIRKRKLSDGAAQTLDIYVVKRGLCSALCPLLSPQRRSRLLEEIRRDVRDLSRIYIQLGIFYNLYMKTAPALPDIPDVLNFVNAMKGKGPYAESYTRYFGDHRRYDGKLRSFIVQELAKQYETTLRTNITMHAYSRLARYFKVKRNDERLFRAYYSRILPDGDDNTSREIARVCTVINKDTVEGSRWWKTVPEWMRIQQGMETRRWFELLRRVAPDTVPGTWNKITDHLSQLWTPWLDVPATKFGCCLQTDGVSVSLSMNRCAKPQMTEKKKKRRVEYDRVIAVDPGSRVPLATVESKRYSFKRVTRKYVRSHTLEWKRDRVRNKLIAPILAEMQKDRESLNFPVSSKNTDHVIEYSVFRMKWFEAMQVPYETHSKLTRLGLDKYIRIAKCEERIVREVFDGGGVSDVLVLYGAGSKFMNTASFSGRKFRHDSLLKRLRSKSNIRVEIVDEAYTSQACSACNQRTGAFQKIGMNHRLRWGVCPTCHSEFDRDENAAKNILINHIRSTICRPRCLPGRAS

SEQ ID NO: 4453 - protein, 474 aa, Cydia splendana
MKTAPALPDIPDVLNFVNAMKGKGPYAESYTRYLGDHRRYDGKLRSFIVQELAKQYETTLRTNITMHAYSRLARYFKVKRNDERLFRAYYSRILPDGDDNTSREIARVCTVINKDTVEGSRWWKTVPEWMRIQQGMETRSFRLFPQPSHGLKHVMYTSTGWFELLRRVAPDTVPGTWNKITDHLSQLWTPWLDVPATKFGCCLQTDGVSVSLSMNRCAKPQMTEKKKKRRVEYDRVIAVDPGSRVPLATVESKRYSFKRVTRKYVRSHTLEWKRDRVRNKLIAPILAEMQKDRESLNFPVSSKNTDHVIEYSVFRMKWFEAMQVPYETHSKLTRLGLDKYIRIAKCEERIVREVFDGGGVSDVLVLYGAGSKFMNTASFSGRKFRHDSLLKRLRSKSNIRVEIVDEAYTSQACSACNQRTGAFQKIGMNHRLRWGVCPTCHSEFDRDENAAKNILINHIRSTICRPRCLPGRAS

SEQ ID NO: 4454 - protein, 638 aa, Cydia splendana
MEKQCKSCGGTDHHRRSSAKCTNYLPPIRKRKLSDGAAQTLDIYVVKRGLCSALCPLLSPQRRSRLLEEIRRDVRDLSRIYIQLGIFYNLYMKTAPALPDIPDVLNFVYAMKGKGPYAESYTRYFGDHRRYDGKLRSFIVQELAKQYETTLRTNITMHAYSRLARYFKVKRNDERLFRAYYSRILPDGDDNTSREIARVCTVINKDTVEGSRWWKTVPEWMRIQQGMETRSFRLFPQPSHGLKHVMYTSTGWFELLRRVAPDTVPGTWNKITDHLSQLWTPWLDVPATKFGCCLQTDGVSVSLSMNRCAKPQMTEKKKKRRVEYDRVIAVDPGSRVPLATVESKRYSFKRVTRKYVRSHTLEWKRDRVRNKLIAPILAEMQKDRESLNFPVSSKNTDHVIEYSVFRMKWFEATQVPYETHSKLTRLGLDKYIRIAKCEERIVREVFDGGGVSDVLVLYGAGSKFMNTASFSGRKFRHDSLLKRLRSKSNISVEIVDEAYTSQACSACNQRTGAFQKIGMNHRLRWGVCPTCHSEFDRDENAAKNILINHIRATDGLPDEFRLAPETFSLSRDSKKWARKEGSLDSLPGGYRDDTRPAAKMRPVDTPKQLPYEFRLAPESFSLSRGSGKPGSLIGDSRH

SEQ ID NO: 4455 - protein, 574 aa, Cydia splendana
MTDDSGSSVMEKQCKSCGGTDHHRRSSAKCTNYLPPIRKRKLSDGAAQTLDIYVVKRGLCSALCPLLSPQRRSRLLEEIRRDVRDLSRIYIQLGLFYNLYMKTAPVLPDIPDVLNFVYAMKGKGPYAESYTRYFGDHRRYDGKLRSFIVQELAKQYETTLRTNITMHAYSRLARYFKVKRNDERLFRAYYSRILPDGDDNTSREIARVCTVINKDTVEGSRWWKTVPEWMRIQQGMETRSFRLFPQPSHGLKHVMYTSTGWFELLRRVAPDTVPGTWNKITDHLSQLWTPWLDVPATKFGCCLQTDGVSVSLSKNRCAKPQMTEKKKKRRVEYDKVIAVDPGSRVPLATVESKRHSFKRVTRKYVRSHTLEWKRDRVRNKLIAPILAEMQKDRESLNFPVSSKNTDHVIEYSVFRMKWFEAMQVPYETHSKLTRLGLDKYIRIAKCEERIVREVFDGGGVSDVLVLYGAGSKFMNTASFSGRKFRHDSLLKRLRSKSNIRVEIVDEAYTSQACSACNQRTGAFQKIGMNHRLRWGVCPTCHSEFGRDENAAKNILINHIRSTICRPRCLPKKVS

SEQ ID NO: 4456 - protein, 610 aa, Apamea monoglypha
MACPSCGKDDHQRSSSAKCLNRKRRIRETGLANDQEVSVYSVKKGLTSVLCPLSDCKEAIVRTIREDVREMSRLSIELSYVVNFFYKHYSNREDFHILFPKFDALQFTYALKGAKYKLNDPDNVISTYMSLRNQNNLYDGRLRSFIIMQIAKQYSTILETNITTQHAFKRIKRYMYHKFGDSMDKSEIHSSTYDAYYNGVCKSNRIGEWFNENRINSKDVSKNFWRFVPLFLQIQHELYDQGKLSFNVFPIYSHGLKFITYDSRCIHELLRRVDSSNTPSSWTDFSENTSMYWNRHFTLPRKFGYSFSTDGVSVTLSMNRIVQKGQKFTSKKAKRSEDALQNTTVGGVRNYSKVIAVDPGAKTPIVTCTCNGGDFSYKVLKKERVVYESKECHRARKRLRFLKDIEERIKVDRESTEQEIGIELTRKSQNAEPYTRFQLKWFDEKQRMYEQRRVQRLKFDKYINDQKMLHKIVDEYFGKEPDTLVVYGAGFDFMNKGTFKGHRKFRHNDVIKIIKQRRNLSVYVINEAYTTKNCSYCHDRDRIQQKLSVSKSPHRYVHCSVCRKGIHRDKNGAKNILLKYENMKKLPISLSSVGTDMSLVDGGSSQGSLS

SEQ ID NO: 4457 - protein, 609 aa, Apamea monoglypha
MACPSCGKDDHQRSSSAKCLNRKRRIRETGLANDQEVSVYSVKKGLTSVLCPLSDCKEAIVRTIREDVREMSRLSIELSYVVNFFYKHYSNREDFHILFPKFDALQFTYALKGAKYKLNDPDNVISTYMSLRNQNNLYDGRLRSFIIMQIAKQYSTILETNITTHAFKRIKRYMYHKFGDSMDKSEVHSSTYDAYYNGVCKSNRIGEWFNENRINSKGVSKNFWRFVPLFLQIQHELYDQGKLSFNVFPIYSHELKFITYDSRCIHELLRRVDSSNTPSSWTDFSENTSMYWNRHFTLPRKFGYSFSTDGVSVTLSMNRIVQKGQKFKSKKAKRSEDALQNTTVGGVRNYSKVIAVDPGAKTPIVTCTRNGGDFSYKVLKKERVVYESKECHRARKRLRFLKDIEERIKVDRESTEQEIGIELTRKSQNAEPYTRFQLKWFDEKQRMYEQRRVQRLKFDKYINDQKMLHKIVDEYFGKEPDTLVVYGAGFDFMNKGTFKGHRKFRHNDVIKIIKQRRNLSVYVINEAYTTKNCSYCHDRDRIQQKLSVSKSPHRYVHCSVCRKGIHRDKNGAKNILLKYENMKKLPISLSSVGTDMSLVDGGSSQGSLS

SEQ ID NO: 4458 - protein, 343 aa, Pammene fasciana
METRSFRLFPQPSHGLKHVTYTSIGWYELLRRVAPDTVPGAWTKITDHLCQLWMPWLEVPAAKFGCCLQTDGVSVSLSMNRCVKSQTTKKNKKLQHVEYDRVIAVDPGSRIPLATVESKRYAFKRVTRKYVRSHTLEWKRDRIRNKLIAPILVDMQKDRELFNFPVSSKNTDHVIEYTVFRIKWFKAMQVPYETHSKLTRLGLDKYISIAKCEERIVRQVFDGGGASDVLVLYGAGCKFMNAASFSGRKFRHDSLLRRLRNKSNIQVEIVDESHTSQACSACNQRTGEFQKIGMNHRLRWGVCPTCHSEFDRDANAAKNILINHTRSTICRPRCLPRRGIVTF

SEQ ID NO: 4459 - protein, 578 aa, Pammene fasciana
MPKGSSSSVMDKKCKSCGGVDHERRSSARCANYLPPIRKRKLSDGAAQTLEVYVIKRGLCSVLCPLISPQQRSRLIEEIRRDVRDLSRIYVKLGIFYNLYMKTAPVLPDTPDVLNFVYAMKGKGPYTEPYARYFGENCHYDGKLRSYILQELAKQYETTLRTNITTHAYSRLARCLKVKRNDERLFRAYYKKVSPDGDDYTSREIARVCAIINKDTVEGKRWWNTVPEWMRIQQGMETRSFRLFPQPSHGLKHVTYTSIGWYELLRRVAPDTVPGAWTKITDHLCQLWTPWLKVPAAKFGCCLQTDGVSVSLSMNRCVKSLTTKKNKKLQHVEYDRVIAVDPGSRIPLATVESKRYAFKRVTRKYVRSHTLEWKRDRIRNKLIAPILADMQKDRESFNFPVSSKNTDHVIEYTIFRIKWFEAMQVPYESHSKLTRLGLDKYISIAKCEERIVRQVFDGGGASDVLVLYGAGCKFMNTASFSGRKFRHDSLLRRLRNKSNIQVEIVDESYTSQACSTCNQRTGEFQKIGMNHQLRWGVCPTCHSEFDRDANAAKNILINHTRSTICRPRCLPGRGIVTS

SEQ ID NO: 4460 - protein, 257 aa, Pammene fasciana
MDAHSAGDGDAQLSSVSAAIAWTQACDIHIDWMVRATAPSRSRYRPRCLDQNYRPSLSTVDAVVESASRQIRLLSSDGRLSSKNTDHVIEYTIFRIKWFEAMQVPYESHSKLTRLGLDKYISIAKCEERIVRQVFDGGGASDVLVLYGAGCKFMNTASFSGRKFRHYSLLRRLRNKSNIQVEIVDESYSSQACSTCNQRTGEFQKIGMNHQLRWGVCPTCQSEFDRDANAAKNILINHTRSTICRPRCLPGRGIVTS

SEQ ID NO: 4461 - protein, 578 aa, Pammene fasciana
MPKGSSSSVMDKKCKSCGGVDHERRSSARCANYLPPIRKRKLSDGAAQTLEVYVIKRGLCSVLCPLISPQQRSRLIEEIRRDVRDLSRIYVKLGIFYNLYMKTAPVLPDTPDVLNFVYAMKGKGPYTEPYARYFGENCHYDGKLRSYILQELAKQYETTLRTNITTHAYSRLARCLKVKRNDERLFRAYYKKVSPDRDDYTSREIARVCAIINKDTVEGKRWWNTVPEWMRIQQGMETRSFRLFPQPSHGLKHVTYTSIGWYELLRRVAPDTVPGAWTKITDHLCQLWTPWLKVPAAKFGCCLQTDGVSVSLSMNRCVKSLTTKKNKKLQHVEYDRVIAVDPGSRIPLATVESKRYAFKRVTRKYVRSHTLEWKRDRIRNKLIAPILADMQKDRESFNFPVSSKNTDHVIEYTIFRIKWFEAMQVPYESHSKLTRLGLDKYISIAKCEERIVRQVFDGGGASDVLVLYGAGCKFMNTASFSGRKFRHDSLLRRLRNKSNIQVEIVDESYTSQACSTCNQRTGEFQKIGMNHQLRWGVCPTCHSEFDRDANAAKNILINHTRSTICRPRCLPGRGIVTS

SEQ ID NO: 4462 - protein, 578 aa, Pammene fasciana
MPKGSSSSVMDKKCKSCGGVDHERRSSARCANYLPPIRKRKLSDGAAQTLEVYVIKRGLCSVLCPLISPQQRSRLIEEIRRDVRDLSRIYVKLGIFYNLYMKTAPVLPDTPDVLNFVYAMKGKGPYTEPYARYFGENCHYDGKLRSYILQELAKQYETTLRTNITTHAYSRLARCLKVKRNDERLFRAYYKKVSPDGDDYTSREIARVCAIINKDTVEGKRWWNTVPEWMRIQQGMETRSFRLFPQPSHGLKHVTYTSIGWYELLRRVAPDTVPGAWTKITDHLCQLWTPWLKVPAAKFGCCLQTDGVSVSLSMNRCVKSQTTKKNKKLQHVEYDRVIAVDPGSRIPLATVESKRYAFKRVTRKYVRSHTLEWKRDRIRNKLIAPILADMQKDRESFNFPVSSKNTDHVIEYTIFRIKWFEAMQVPYESHSKLTRLGLDKYISIAKCEERIVRQVFDGGGASDVLVLYGAGCKFMNTASFSGRKFRHDSLLRRLRNKSNIQVEIVDESYTSQACSTCNQRTGEFQKIGMNHQLRWGVCPTCHSEFDRDANAAKNILINHTRSTICRPRCLPGRGIVTS

SEQ ID NO: 4463 - protein, 370 aa, Pammene fasciana
MPIINKDTVEGKRWWNTVPEWMRIQQGMETRSFRLFPQPSHGLKHVTYTSIGWYELLRRVAPDTVPGAWTKITDHLCQLWTSWLKVPAAKFGCCLQTDGVSVSLSMNRCVKSQTTKKNKKLQHVEYDRVIAVDPGSRIPLATVESKRYAFKHVTRKYVRSHTLEWKRDRIRNKLIAPILADMQKDRESFNFPVSSKNTDHVIEYTIFRIKWFESMQVPYESHSKLTRLGLDKYISIAKCEERIVRQVFDGGGASDVLVLYGAGCKFMNTASFSGRKFRHDSLLRRLRNKSNIQVEIVDESYTSQACSTCNQRTGEFQKIGMNHQLRWGVCPTCHSEFDRDANAAKNILINHTRSTICRPRCLPGRGIVTS

SEQ ID NO: 4464 - protein, 429 aa, Dunaliella primolecta
MWDSISRGVESVIGAMRGVAQRVAARWTGNSGAPARDMAVPLGRNNPPPEQLFRQGAESRWIPEPDVMELLDAAALYPIVCEHMRGRMGRRGLAKGTASKKDLVDRLQQALPARSRRWLERQPVVELLAACAAFGVDEGIDGDTVKATLVSMARLRAKKPGDPKRPVVVGVGASKMPPAAHGVQKFSAPTQLKKALLRAMLRGVGHSKLHPRMLMSLNEYKTTVSCSRCGARTVEPMVRDFVTHLQRKSRRLRECPVCKEEYFKQQQQQVEGMAEGGGEQQQVEGMAEGGGEQQLVEGMAEEGGEQQPVEGMAEGGGEQQPVEGVSETDEEEEQEEGMSRQGSTGWAGMDLDEEEEEVGGVGEGGMGANEAEGEVHAAVPGRRRERVKKPQRSYQMHRDVNAAWNLWEVCVAQYFGHPRPRYLRADTAA

SEQ ID NO: 4465 - protein, 816 aa, Dunaliella primolecta
MANSPKPTPGMAQFDVVPPGPIHRDKKMMLAKFLQATPGFSSKPSSQWKLHPEKQRQSSKSRPPAGPPSTSAVPWVLEKDGEVVQRGVPDGPTMGTTTPSAPTISHASSYFIFSKHGSTITAFPVDDLLNFKPLPRRPGAQPQTLETAELAMRNGRNMPEQSDLRLVPKSVKEAALRNAEERGGLQGKVGGRGGGRGGGKPDQAAILMASLFGDDDEEGTPQRRRASGGGGRGRPRGGGSRGGEDVDLDAQEVPDDIYAGEQDDELRPAKPGQAEDWEHEELPDDDDLGQGEDESEKLEDDPGERRKLGIEGGSDEEEAPAEEEEEEGEEEKKRKLQEQASQEPGAMYEGMEQPTCDTNKQDVSLGVGEGDEDLDLDAMAMDAFGAAPRTAGGSAKRKLVEEEDTPVIAGQPPRPGAPKRPRNAAAVPAEKGIPATKQEPTAAAQPSIPASEVTAEEIAAELRKAGGGLPLQQIKSIFMARIKGKAATDAFKSKLLQGGSRTGGPGFRQYMAVLAEHFDVLVEEFLDSPKRAHASMLRYRGKRRAWDQFSSRLLRTLCKGSDPKRPVVVGVGASKMPPAAHGVQKFSAPTQLKKALLRAMLRGVGHSKLHPRMLMSLNEYKTTVSCSRCGARTVEPMVRDFVTHLQRKSRRLRECPVCKEEYFKQQQQQVEGMAEGGGEQQQVEGMAEGGGEQQQVEGMAEGGGERQPVEGVSETDEEEEQEEGMSRQGSTDWAGMDLDEEEEEVGGVGEGGMGANEAEGEVHAAVPGRRRERVKKPQRSYQMHRDVNAAWNLWEVCVAQYFGHPRPRYLRADTAA

SEQ ID NO: 4466 - protein, 262 aa, Dunaliella primolecta
MLLKHLQVHVLVNKQTEGSDPKRPVVVGVGASKMPPAAHGVQKFSAPTQLKKALLRAMLRGVGHSKLHPRMLMSLNEYKTTVSCSRCGARTVEPMVRDFVSHLQRKSRRLRECPVCKEEYFKQQQQQQIEGMAEGGGEQQQVEGMAEGGGEQQPVEGVSETDEEVEKEEGMSRHGSTDWAGMDLDEEEEEVGGVVEGGMGANEAEGEVHAVVPGRRRERVKKPQRSYQMHRDVNAAWNLWEVCVAQYFGHPRPGYLRADTAA

SEQ ID NO: 4467 - protein, 305 aa, Dunaliella primolecta
MAVLAEHFDVLVEEFLDSPKRAHASMLRYRGKRRAWDQFSSRLLRTLCKGSDPKRPVVFGVGASKMPPAAHGVQKFSAPTQLKKALLRAMLRGVGHSKLHPRMLMSLNEYKTTVSCSRCGARTVEPMVRDFVSHLQRKSRRLRECPVCNEEYFKQQQQIEGMAEGGGEQQQVEGMAEGGGEQQQVEGMAEGGGEQQPVEGVSETDEEVEKEEGMSRQGSTGWAGMDLDEEEEEVGGVGEGGMGANEAEGEVHAAVPGRRRERVKKPQRSYQMHRDVNAAWNLWEVCVAQYFGHPRPRYLRADTAA

SEQ ID NO: 4468 - protein, 975 aa, Dunaliella primolecta
LRHRCQEEIQQKKLQRLQQKQASTPAAPPKRPVGRPKGSKNPAPPLPNHNPAPVLPSGEPPQQQQQQLQAPQQQDPQQQQQQAQKHKRDPKRPVVVGVGASKMPPAAHGVQKFTAPTQLKKALLRALLRGVGHSKLHPRMLTGLNEFKTTVSCSRCGARTVEPMVRDFVSHLPRKSRRLRECPVCKDEYLKQQQQQVEGVAEGGGGQQQVEGMAEGGGGQQPVEGMAEGGGEQQQIEGMAEGVGEQQPVEGVSETDEEEEQEEGMSRQGSTDWAGMDLDDEEEEVGGVEEGGMGGNEAEGGVHAAVPGRRRERAKKPQLSYQMHRDVNAAWNLWELWSPQPQQQLQPQQLQQHDILPWEQQESKKQSAGSVMQQSLVALPLPLEERGAVSSQALLDSQEQIRGLQEQLAKNASQRLAYDAASLRAALGDNDFTLTADTLKFLVDRPIQALQVCKALGKIPAREKDMLTHHMRFFYGSYPNGYSENTWNTWYGYMWRLLRWIGAYAAGTMLPVDTAAHHIEQLEARYINGSTPMAHWHGICRDLAADPRLCPGTPLNRRLKEDGWSIASPTDLVHGIFDTKFKLNVDRMGLDPQRIRDICAWIIEILHYRQCAADLRTEQVVDQSDVGHRPSFGAPIGNMRAYAWRMFSSKAAALPSVPIDEDEQAQGWVRRHYEHELQVQSISPRPQLQEGREAATSARGQPFQRRQSEGSSASISTLDEETQHASDWSGRGTNAGPARASTGLDEFAAGFQAAANELSWIAPGSTPMPHWHGICRDLAADPRLCPGTPLNRRLKEDGWSIASPTDLVHGIFDTKFKLNVDRMGLDPQSIRDICAWIIEILHYRQCAADLRTEQVVDQSDVGHRPSFGAPIGNMRAYAWRMFSSKAAALPSVPIDEDEQAQGWVRRHYEHELQVQSISPRPQLQEGREAATSARGQPFQRRQSEGSSASISTLDEYMSLNLKFMQIVSSQAKAKF

SEQ ID NO: 4469 - protein, 1184 aa, Dunaliella primolecta
AGSSNKQEAGELMLPSHTEEQTALAAQQQQQQQQRHRRHHMHRRNVSASDAGCLPGLGTSVPVAAPSSASNLLFAPRSTEAAPSNTLLGMRRISAGGVTSDTTFPRHSEPLLPGLRSPRASGLPPTSPPSSNAPPPSFSTSARSQNQPPHRRTPSDAPSSSRPHHRHTRTVSATESQIEATAAVISGSLGGGGEGLTGLALVGLGPTPGHSRNVSGSMPGLSRGHTRNISGTFTDCSDGDNGCGVCFDNPSNLLLRGCGHKICVQCYRQLVRPGAAPSARCPFCSAEAGGRPDVDKELRGAGGWRGMGAFLLHGEQISPSASNPQQSTSCHCCTVHVQGALLRRVKEYLHCVQLPLEDNGWQESRQELFEMVVHGTVEAHVQDMSPALAHCLEQLRVTLQPHREYMGPLPRRISKPLQDLLPLHLFLTRHQRPGAPTPPAPLPSEEEHPEDAGHAGLAAALDERQAFTPARGAAAPVSPTPAATEASAAPPHPPPQLHAFEASSAASPPPSPSPPKIVYVSSGQATPPNTRPFMPLSPLPRLESAALDQMIVVDMCSGLRKERGYAQVLQELLPGMPEPQRRNAIPLVKLLPELSADQVTQRRGAAQKDKRKKGKARHRVGGGVIAKHLEPHFARTDGVALCICYRPIQHAPVHEAEHLWQKHVRRVVDLDKAFWKGEKLPSGSMGGKGGVPGGGREGVRGVDSAGASSSAGEASLGAGESGGVPKLQRNEHGDYLFHWVEGNQLLPEAVAVDPGGAFKGYGAARSTLPAHRHPHELPTRAWLKQGEGVSAIPTPAQVPLPKQHMASSAASASPGSKWQAKRKARKERVMRDTHVESTVSLSHGEYVGAWRQKKQRRQEQQWQSNPPVKAALEDLSRQGGSRTGGPGFRQYMAVLAEHFDVLVEEFLDSPKRAHASMLRYRGKRRAWDQFSSRLLRTLCKGSDPKRPVVVGVGASKMPPAAHGVQKFSAPTQLKKALLRAMLRGVGHSKLHPRMLMSLNEYKTTVSCSRCGARTVEPMVRDFVTHLQRKSWRLRECPVCKEEYFKQQQQQVEGMAEGGGEQQQVEGMAEGGGEQQPVEGVSETDEEEEQEEGMSRQGSTDWAGMDLDEEEEEVGGVGEGGMGANEAEGEVHAAVPGRRRERVKKPQRSYQMHRDVNAAWNLWEVCVAQYFGHPRPSYLRADTAA

SEQ ID NO: 4470 - protein, 347 aa, Hydraecia micacea
MLCPLLEPEKKLKILLEIRRNVRDLSRVYIELGVCRLSMTLCFYEDYYKKTASDVSEKHDILNFLYAMKGKGSYAEAYRSCFGPRVYDGKLRSFVVQELAKQYETVLHSTRLARGWHERIRRVDPTAISSVWGNIANYLQELWAPWLAVGSRFGCSLQTDEVSVSLSMNRIVKQPVIKKQKRAYERIIAVDPGSRVPVSTVESVEFQRIAKKYVRSHTLEWKRDRVRTKLTKSIEVAEQTDRERSSFPISSKNRSHVIEYTVFRMKWIDARQAPYELHAKLTRLKVDKYLRTARCEEKIIKEVFGGRGVEPVLVLYGAGSTFMNRATFSGRKYKHDSLIRRLRQTQA

SEQ ID NO: 4471 - protein, 478 aa, Agrochola circellaris
MKTAIQLPSKPDVLNFIYAMKGKGPYADSYRAIFGNRKFDGRLRSFVVQEMAKQYETVLHTNISTHAYARLARYFNVKRNDPALYAAFFKKELPADNEEMRRVCTIINVDTLQGAKWWTTIPEWLKIQAKLEDFKLFPQPSHGHKHLTYTSIGWHELLRRVDPKSITSCWARIVDHRRELWARIVDHRRELWAPWLDVDMKKFGCSLQTDGISVSLSMNRILKNVAPTLTKRSKKTYDRIIAVDPGSRIPVAAVESKRLQFRRITKKFVRSHTLEWKRERIRNKLCRVSEEAEQEAREKLTFPVSSKNTSHVVAYTVFRMTWFDVRQEPYEKHAKLTRLGLDKYIRTAKCEEKIVKEVFDGGGVESTLVLYGAGSKFMNTASFSGRKFKHDSLIKRLRSKRHIDVKVVDEQYTSQACSSCNAKTREFQKIVMNHKLRWGVCRNCNSEFDRDVNAAKNILINYTRSALCRPVCSTNGAS

SEQ ID NO: 4472 - protein, 391 aa, Agrochola circellaris
MKTAIQLPSKPDVLNFIYAMKGKGPYADSYRAIFGDRKFDGRLRSFVVQEMAKQYETVLHTNISTHAYARLARYFKVKRNDPALYAAFFKKELPNDNEEMRRVCTIIIVDTLQGAKWWTTIPEWLKIQAKLKDFKLFPQPSHGRKHLTYTSIGWHELLRRVDPKSITSCWARIVDHRRELWAPWLDVDMKKIGCSLQTDGISVSLSMNRIKKNVAPTLTKRSKKTYDRIIAVDPGSQIPVAAVESKRLQFRRITKKFVRAHTLEWKRERIRNKLCRVSEEAEQKAREKLTFPVSSKNTSHVVEYTVFRMTWFDVRQEPYEKHAKLTRLGLDKYIRTAKCEEKIVKEVFDGGGVESTLVLYGAGSKFMNTASFSGRKFKHDSLIKRLRSSVT

SEQ ID NO: 4473 - protein, 386 aa, Agrochola circellaris
MKQNFWKHVPLFVKIQHELYENDKKSFNVFPIYKHGLKHITYDSRCLHELLRRVDAENTPSTWVKFSESNPKQYWRRYFSLPKNFGWSFNTDGVCVSLSMNRLVTKKDKFKTKRLKKEETLNENENQLYKNYRKIIAVDPGAKTPIVTCNRKSSSNDTFEYKTLKKGRVVCEAKEHQREKKRLKLTKDVDLKIRNDRESLEKELGFIISCKNSNVEDYTKFQLKWFDEKQKIYEQRRLQRLKFDKYINDQKTNHKIVDEYFGKDPDTLVVYGAGFDFMNKGTFKGHRKFRHNDILKIVKQRKNLSLYIINEAFTTKNCSKCYEKKIQQKLHVSKSPHRYVYCSVCRKGIHRDKNGAKNILLKFEYKLSSIPSFADTDMNFMGGGSS

SEQ ID NO: 4474 - protein, 555 aa, Agrochola circellaris
MAACKTCGGSDHTRTSSKKCKNYLPPIRKRNLSESKANQLEIYTVKRGLASCLCPLLDPEKKLKLLTEIRRDVRDLSRVYIELGVWYNYYMKTTAQLPPKPDVLNFIYAMKGKGPYANAYIKMFGERKFDDKLRSFVVQEMAKQYETVLHTNISTHAYSRLARYFNVKRNDPTLFSAFFKKVLPDDNEEMRQVCSIINVDTVGGAKWWATVPEWLKIQAKLKDFKLFPQPSHGLKHITYTSTGWHELLRRVDPKSITSVWSRIEDHRRELWAPWLNVDMKNFGCSLQTDGFNVSLSMNRIKKPDMGQSPKRSKKSYDRIIAVDPGSRIPVAAVESRRFNFQRVTKKYVRSHTLEWKRARVRNKLCRVSEEAEKKAREKLEFPVSSKNVTHVVEYTVFRMHWFNVRQEPYERHAKLTRLKLDKYIRTAKCEEKIIKEIFDDSSNTLVLYGAGSKFMNNASFSGRKFKHDSLIKRLRSKPNIDVEVVDEQYTSQACSSCNATTGQFQKIVMNHRLRWGVCPNCNSEFDRDTNAAKNILINYTRSGICRPGCSTNGAS

SEQ ID NO: 4475 - protein, 433 aa, Agrochola circellaris
MFGERKFDDKLRSFVVQEMAKQYETVLHTNISTHAYSRLARYFNVKRNDPTLFSALFKKVLPDDNEEMRQVCSIINVDTVGGAKWWATVPEWLKIQAKLKDFKLFPQPSHGLKHITYTSTGWHELLRRVDPKSITSVWSRIEDHRRELWAPWLNVDMKKFGCSLQTDGFNVSLSMNRIKKPDMGQSPKRSKKSYDRIIAVDPGSRIPVAAVESRRFNFQRVTKKYVRSHTLEWKRARVRNKLCRVSEEAEKKAREKLEFPVSSKNVTHVVEYTVFRMHWFNVRQEPYERHAKLTRLKLDKYIRTAKCEEKIIKEIFDDSSNTLVLYGAGSKFMNNASFSGRKFKHDSLIKRLRSKPNIDVEVVDEQYTSQACSSCNATTGQFQKIVMNHRLRWGVCPNCNSEFDRDTNAAKNILINYTRSAICRPGCSTNGAS

SEQ ID NO: 4476 - protein, 509 aa, Agrochola circellaris
MPCPSCGKDDHARSSSSKCLKRKIRVRETELEEDQEISVYCIKKGLCSFICHLSEKKEKLLKTIRSDVKELSRLSIELSYLVNYFFKKYYSHEDFQQLFPKFDPLHDNEIGRWFEINKISEKEMKQNFWKHVPLFVKIQHELYENDKKSFNVFPIYKHGLKHITYDSRCLHELLRRVDAENTPSTWVKFSESNPKQYWRRYFSLPKNFGWSFNTDGVCVSLSMNRLVTKKDKFKTKRLKKEETLNENENQLYKNYRKIIAVDPGAKTPIVTCNRKSSSNDTFEYKTLKKGRVVCEAKEHQREKKRLKLTKDVDLKIRNDRESLEKELGFIISCKNSNVEDYTKFQLKWFDEKQKIYEQRRLQRLKFDKYINDQKTNHKIVDEYFGKDPDTLVVYGAGFDFMNKGTFKGHRKFRHNDILKIVKQRKNLSLYIINEAFTTKNCSKCYEKKIQQKLHVSKSPHRYVYCSVCRKGIHRDKNGAKNILLKFEYKLSSIPSFADTDMNFMGGGSS

SEQ ID NO: 4477 - protein, 776 aa, Agrochola circellaris
MPIPKIIVDRKRASDHRRGKTAVITSSPYKNELITISQNKTPKLNLNQPPKTKKPKQKIINDNICLYCLEEYGSSRVDEGWVQCTECKGWAHEGCTGYDSEDLDNFVYPRVHSSLYNPLSSLVSISSMAACKTCGGSDHTRTSSKKCKNYLPPIRKRNLSESKANQLEIYTVKRGLASCLCPLLDPEKKLKLLTEIRRDVRDLSRVYIELGVWYNYYMKTTAQLPPKPDVLNFIYAMKGKGPYANAYIKMFGERKFDDKLRSFVVQEMAKQYETVLHTNISTHAYSRLARYFNVKRNDPTLFSAFFKKVLPDDNEEMRQVCSIINVDTVGGAKWWATVPEWLKIQAKLKDFKLFPQPSHGLKHITYTSTGWHELLRRVDPKSITSVWSRIEDHRRELWAPWLNVDMKKFGCSLQTDGFNVSLSMNRIKKPDMGQSPKRSKKSYDRIIAVDPGSRIPGAAVESRRFNFQRVTKKYVRSHTLEWKRARVRNKLCRVSEEAEKKAREKLEFPVSSKLLMSWNTLFLECTGSTGRKFKHDSLIKRLRSKPNIDVEVVDEQYTSQACSSCNATTGQFQKIVMNHRLRWGVCPNCNSEFDRDTNAAKNILINYTRSAICIHGDDIIGPVFIDGTLTGERFVNLLNDTVSEYTDSLNAHRYQRMWYQLDGAPAHSVTAARQWLNNAFGAQWIGRFGPRRWPARSPDLTPLDFFLWGFIKDDVYAENIDSVEQLRLRITNAFAKLREIALRGNLFSKVRDNMSVRSRSGMLLNLKILIMQIFSV

SEQ ID NO: 4478 - protein, 680 aa, Griposia aprilina
MNRVIKKDQKFKSKKVKKCEESLENTAVGSKRNYSKVIAVDPGAKTPIVTCTRNGDDFTYKVLKKERVMYESKECHRVRKRLRYIKDIEDRIRVDSESFEKETGVELTRKSKNTEIYTRFQLKWFDEKQRMYEQRRVQRLKFDKYINDQKMLNKIVDEYFGKEPDTLVVYGAGFDFMNKGTFKGHRKFRHNEVLKIAKQRKNLSVFVINEAFTTKIVVTATNLVQRILYVYQSLHTVTYTAVATVLQEKCFYIPRGTRVCEEHMLDSVWQNIESSTRRILSEFAPSHLKDMMDMLRTRKVFLDFDRRSLINNSIFHYYIGFSKSQFQEILQSCPSISQRYKNKAGRALATVITKLHTGESNQRLSQIFNMSRKTLEKTMRLVRQDLISEFVPLHLGYNHLTRQDVISRCLTIPNTLFGNPDGSLNERKAIIILDGTYIYLQKSSNYYFQRKSYSLHKFRDLLKPFLLVCPDGHIIDIYGLYEATKSDATILSEIFKNPYDPFHWFFHEDDVLILDRGFRDCIEDVESCGYRAYMPSSKDENEYQLTTQQANDSRKVTMCRWVVETINGRLKNQFRQLRSQNFNVAASHLFEEIRIAAALLNAFGVPLTDHRLTQEIVNRIPHHSPRNQLAEYVITNNMNRRRADFESMNAEVPGLQGRSYRRICRINYTGPPGHGGPQSV

SEQ ID NO: 4479 - protein, 602 aa, Griposia aprilina
MPCPSCGKDDHARSSSSKCLNRKRRIRETDLDSNQEVSIYNVKKGLTSVLCPLSDCKEAIILAIRDDVREMSRLSIELSYLINFFYKHYSTRDDFHLLFPKFDALQFTYALKGAEHKLNDPDDVISTYTSWRKNNTFYDGRLRSFTLMQIAKQYSTILETNIQTHAFKRLKRYMYHKFGEDMDKSEVHSSTYDAYYNVMCKSNRIGEWFTENKINSKELKKDFWKFIPLLLRIQHELYEMKKPSFNIFPIYSHGLKFIKYDSRCVHELLRRVDQKNTPSVWSIFSENTTMCWNRHFTLPRKFGYSFSTDGVSVCLSMNRVIKKDQKFKSKKVKKCEESLENTAVGSKRNYSKVIAVDPGAKTPIVTCTRNGDDFTYKVLKKERVMYESKECHRVRKILRSINDIEDRIRVDRESFEKETGVELTRKSKNTEIYTRFQLKWFDEKQRVYEQRRVQRLKFDKYINDQKMLNKIVDEYFGKEPDTLVVYGAGFDFMNKGTFKGHRKFRHNEVLKIAKQRKNLSVFVINEAFTTNNCSYCYESGAKNTLRVSKSPHRYVYCSVCRKGIHRDKNGAKNILLKYEYTKLPIPLSSVGTDMDRVDGGSL

SEQ ID NO: 4480 - protein, 228 aa, Agrochola macilenta
MYKILKKERVVYESKEHHRARKRLRFIKDVEDRIRLDRETTELETCIALTPKSCNVTAYTRFQLKWFNEKQRVYEQRRLQRLKFDKFMNDQKILNKLVDEYFGNEPDTLVVYGAGFDFMNKGTFKGHRKFRHNEVLKIAKQRKNLSVFVINEAFTTKNCSYCYESGAKNTLRVSKSPHRYVYCSVCRKGIHRDKNGAKNILLKYEYTKLPVGLSSSGSDMDRVDGGSS

SEQ ID NO: 4481 - protein, 565 aa, Erebia ligea
MSSGVQTCGACGGTDHSRRTSKKCKFHLPSIRKRNLQEDEEIEVYMIKRGLVSVLCPLLEPEKKLRLLAEIRRDVRDLSRVYVELGIWINYYMKTAMPSKKPDILNFLYAMKGKGPYVDAYKSFFGKHRTYDGKLRSFVVQEMAKQYETTLHTNVSLHAYGRLARYFKLKRNDPKLFDAYFKKILPVNDDDTAAEMRRICSVINVDTIKNASVWWSTVPMWIEIQEKLQDFRLFPQPSHGLKHLTYTSRGWHELLRRVDPSSISGDWRKIIDHMRELWTPWLNVDVKKFGCCLQTDGISVSLSMNRQVVKKNIESKRKKTTYDRIIAVDPGSRVPVAAVDDTFKFKRITKRYVRSHTLEWKRERVRLRLTKDVLFAEQKARESLDYVISSKNKSRVVEYTRFRMQWFDRRQEPYEKHARLTRLNLDKYMRTARCEEEIVRSVFDGGGPLSTLVLYGKGSKFMNVASFSGRKFRHDSLIRRLRAKRNIVAVEMTDEAYTSQACSTCNQRDGRFSKVSMDKRTRRGVCPNCRDEFDRDANAAKNILINYKRSTVCGPGRFSNKERAS

SEQ ID NO: 4482 - protein, 623 aa, Erebia ligea
MPAHLPPAPAPPCPQPPVLRHPAPHRTSCKGDSGVALASQSFGMLLSHPERMHLKSFTMSSGVQTCGACGGTDHSRRTSKKCKFHLPSIRKRNLQEDEEIEVYMIKRGLVSVLCPLLEPEKKLRLLAEIRRDVRDLSRVYVELGIWINYYMKTAMPSKKPDILNFLYAMKGKGPYVDAYKSFFGKHRTYDGKLRSFVVQEMAKQYETTLHTNVSLHAYGRLARYFKLKRNDPKLFDAYFKKILPVNDDDTAAEMRRICSVINVDTIKNASAWWSTVPMWIEIQEKLQDFRLFPQPSHGLKHLTYTSRGWHELLRRVDPSSISGDWRKIIDHMRELWTPWLNVDVKKFGCCLQTDGISVSLSMNRQVVKKNIESKRKKTTYDRIIAVDPGSRVPVAAVDDTFKFKRLTKRYVRSHTLEWKRERVRLRLTKDVLFAEQKARESLDYVISSKNKSRVVEYTRFRMQWFDRRQEPYEKHARLTRLNLDKYMRTARCEEEIVRSVFDGGGPLSTLVLYGKGSKFMNVASFSGRKFRHDSLIRRLRAKRNIVAVEMTDEAYTSQACSTCNQRDGRFSKVSMDKRTRRGVCPNCRDEFDRDANAAKNILINYKRSTVCGPGRFSNKERAS

SEQ ID NO: 4483 - protein, 292 aa, Erebia ligea
MRELWTPWLNVDVKKFGCCLQTDGISVSLSMNRQVVKKNIESKRKKTTYDRIIAVDPGSRVPVAAVDDTFKFKRITKRYVRSHTLEWKRERVRLRLTKDVLFAEQKARESLDYVISSKNKSRVVEYTRFRMQWFDRRQEPYEKHARLTRLNLDKYMRTARCEEEIVRSVFDGGGPLSTLVLYGKGSKFMNVASFSGRKFRHDSLIRRLRAKRNIVAVEMTDEAYTSQACSTCNQRDGRFSKVSMDKRTRRGVCPNCRDEFDRDANAAKNILINYKRSTVCGPGRFSNKERAS

SEQ ID NO: 4484 - protein, 528 aa, Dryobotodes eremita
MNRIVQKGQKYKLKKAKKSEESLENTTVGGRRNYSKIIAVGPGAKTPIVTCTHNGDDFAYKVLKKEGVVYESKEYHRTRKRLSFIKDIEERIKLDRESTEQESGVELTRKSQNAEDYTRFQLKWFDEKQRLYELRRVQRLKFDKYINDQKTLHKIADEYFGKVPDTLVAYGTRFDFMNKGTLKGHRKFRHNEVLKIIKQRKNLSVFVINEAFTTKNCSYCHDREHAQRKLSVSKSPLRILQCKSISTIRRIAIEGQRNKGVFSIPGNHRTGRPKKELDNFDMGAIRQKVQFFYTVKKIIQKVPDRQALMEKPNIAAKRDKLDKIIKNRNLPDDLRKDIIYLDESYINTSYKLKKQRWQSLNVSGIKESVSKGKRYIIIHAGNENGFVPNALLIFGGKNKNEDYHSEMNKSNFTKWVKEKLIPNLSKPSIIVMDNAPYHSVIRNKAPTPASKVGEIKLWLSENNVPFEESARKLNLLMLVKRHKPMPIYEIDELISEHFHMVIRLPPYHCDLNPIELIWGSLKQKIFLT

SEQ ID NO: 4485 - protein, 380 aa, Dryobotodes eremita
MYHKFGEDMNKSEVHSSTYDAYYNSVRKPNSIGAWFSDNLVTDKEVKTNFWQFIPLFLRIQHELHEQRKSSFNVFPNYSHGIKFITYDSRCMHELLRRVDPANTPSNWPKFSENTTMYLNRHFTLPQNTTVGGRRNYSKIKAVDPGAKTPIVTCTRNGDDFSYKVLKKERVVYESKEYHRTRKRLSFIKDIEERIKLDRESTEQESGVELTRKSQNQEDYTRFQLKWFDEKQRLYEQRRVQRLKFDKYINDQKMLHKIVDEYFGKVPDTLVVYGAGFDFMNKGTFKGHRKFRHNEVLKIIKQRKNLSVFVINEAFTTKNCSYCHDREHAQRKLSVSKSPHRYVYCSVCRKGIHRDKNGAKTYYSNMRTSCRLVLSLSVLI

SEQ ID NO: 4486 - protein, 529 aa, Dryobotodes eremita
MEMVCPSCGKDDHQRSSSAKCSNRKRRIRETGLDSDQEISAYSVKKGLTSVLCPLSARKDAIVLAIRDDVREMSRLSIELSYVVNFFYKHYSNRNDFHILFPKFDALQFSYALKGAKYKLNDPDNVISTYLTLRNNNTLYDGRLTSFQLCRLENNTVQFSRQIYQLMLSKDSKRYMYHKFGEDMDKSEVHSSTYDAYYNSVRKPNSIGAWFSDNLVTDKDVKTNFWQFIPLFLRIQHELHEQRKSSFNVFPNYSHGLKFMTYDSRCMLELLRRVDPANTAVDPGAKTPIVTSTCTRNGVDFSYKVLKKERVVYESKEYHRTRKRLSFIKDIEERIKLDRESTEQESGVELTRKSQNAEDYTRFQLKWFNEKQRLYEQRRVQRLKFDKYINDEKILHKILDEYFGKVPDTLVVYGAGFDFMNKGTFKGHRKFRHNEVLKIIKQRKNLSVFVINEAFTTKNCSYCHDREHAQRKLSVSKSPHRYVYCSVCRKGIHRDKNGAKNILLKYENKLPISLSSVGTDMNLVDGGSS

SEQ ID NO: 4487 - protein, 437 aa, Philereme vetulata
MYYKFGTDMDKSEVHSSTYDAYYNGVCKSIRIGEWFTENKINSKELKKNFWRFIPLFLRIQHELYDQGKLSFNVFPIYSHGLKFITYDSRCMHELLRRVDPNKTPSVWPVFSENTTMYWNRHFILPRKFGYSFSTDGVSVCLSMNRIVQKGQKFKSKKAKKCEESLENTAAVGSKRNYSKVIAVDPGAKTQIVTCTRNGGDFSYKVLKKERVVYESKEYHRARKRLRFLKDIEERIKADRESTEQEIGIELTRKSQNAEPYTRFQLKWFDEKQRIYEQRRVQRLKFDKYINDQKMLHKIVDEYFGKEPDTLVVYGAGFDFMNKGTFKGHRKFRHHDVIKIIKQRRNLSVYVINEAYTTKNCSYCHDRDRIQQKLSVSKSPHRYVHCSVCRKGIHRDKNGAKNILLKYENMKKLPISLSSIGTDMSLVDGRSSQGSLS

SEQ ID NO: 4488 - protein, 610 aa, Philereme vetulata
MPCPSCGKDDHQRSSSAKCLNRKRRVREIGLDSDQEVSVYTVKKGLTSVLCPLNDCKEAIVCAIRDDVREMSRLSIELSYLVNFFYKHYSTRDDFHLLLPKFDALQFTYALKGVKHKLTDPDNVISTYISLRRNNTFYDGRSRSFTIMQIAKQYSTILETNIQTHAFKRLKRYMYHKFGTDMDKSEVHSSTYDAYYNGVCKSNRIGEWFTENKINSKELKKNFWRFIPLFLRIQHELYDQGKLSFNVFPIYSHGLKFITYDSRCMHELLRRVDPNKTPSVWPVFSENTTMYWNRHFILPRKFGYSFSTDGVSVCLSMNRIVQKGQKFKSKKAKKCEESLENTAAVGSKRNYSKVIAVDPRAKTPIVTCTRNGGDFSYKVLKKERVVYESKECHRARKRLRFLKDIEERIKADRESTEQEIGIELTRKSQNAEPYTRFQLKWFDEKQRIYEQRRVQRLKFDKYINDQKMLHKIVDEYFGKEPDTLVVYGAGFDFMNKGTFKGHRKFRHHDVIKIIKQRRNLSVYVINEAYTTKNCSYCHDRDRIQQKLSVSKCPHRYVHCSVCRKGIHRDKNGAKNILLKYENMKKLPISLSSIGTDMSLVDGGSSQGSLS

SEQ ID NO: 4489 - protein, 686 aa, Philereme vetulata
MPCPSCGKDDHQRSSSAKCLNRKRRVREIGLDSDQEVSVYTVKKGLISVLCPLNDCKEAIVCAIRDDVREMSRLSIELSYLVNFFYKHYSTRDDFHLLLPKFDALQFTYALKGVKHKLTDPDNVISTYISLRRNNTFYDGRSRSCTIMQIAKQYSTILETNIQTHAFKRLKRYMYHKFGTDMDKSEVHSSTYDAYYNGHELYDQGKLSFNVFPIYSHGLKFITYDSRCMHELLRRVDPNKTPSVWPVFSENTTMYWNRHFILPRKFGYSFSTDGVSVCLSMNRIVQKGQKFKSKKAKKCEESLENTAAVGSKRNYSKVIAVDPGAKTPIVTCTRNGGDFSYKLLKKERVVYESKDCHRARKRLRFLKDIEERIKADRESTEQEIGIELTRKSQNAEPYTRFQLKWFDEKQRIYEQRRVQRLKFDKYINDQKMLHKIVDEYFGKEPDTLVVYGAGFDFMNKGTFKGHRKFRHHDVIKIIKQRRNLSVYVINEAYTTKNCSYCHDRDRIQQKLSVSKSPHRYVHCSVCRKGIHRDKNGAKNILLKYENMKKLPISLSSIGTDMSLVDGGSSQEESYNKQNDKVYAHSSEEASNRIPRVQRGHFPSSLMVWLRVSYWGLTEVHFCEKGVKTNAVVYQNTVLMNLVEPVSHTMFKNRHWVFQQDSAPAHRAKITQDWLAAREIDFIRHED

SEQ ID NO: 4490 - protein, 349 aa, Philereme vetulata
MPCPSCGKDDHQRSSSAKCLNRKRRVREIGLDSDQEVSVYTVKKGLTSVLCPLNDCKEAIVCAIRDDVREMSRLSIELSYLHELYDQGKLSFNVFPIYSHGLKFITYDSRCMHELLRRVDPNKTPSVWPVFSENTTMYWNRHFILPRKFGYSFSTDGVSVCLSMNRIVQKGQKFKSKKAKKCEESLENTAAVGSKRNYSKVIAVDPGAKTPIVTCTRNGGDFSYKVLKKERVVYESKECHRARKRLRFLKDIEERIKADRESTEQEIGIELTRKSQNAEPYTRFLLKWFDEKQRIYEQRRVQRLKFDKYINDQKVLHKIVDEYFGKEPDTSGLRCRFRFHEQGNVQGSS

SEQ ID NO: 4491 - protein, 610 aa, Philereme vetulata
MPCPSCGKDDHQRSSSAKCLNRKRRVREIGLDSDQEVSVYTVKKGLTSVLCPLNDCKEAIVCAIRDDVREMSRLSIELSYLVNYFYKHYSTRDDFHLLLPKFDALQFTYALKGVKHKLTDPDNVISTYISLRRNNTFYDGRSRSFTIMQIAKQYSTILETNIQTHAFKRLKRYMYHKFGTDMDKSEVHSSTYDAYYNGVCKSNRIGEWFTENKINSKELKKNFWRFIPLFLRIQHELYDQGKLSFNVFPIYSHGLKFITYDSRCMHELLRRVDPNKTPSVWPVFSENTTMYWNRHFILPRKFGYSFSTDGVSVCLSMNRIVQKGQKFKSKKAKKCEESLENTAAVGSKRNYSKVIAVDPGAKTPIVTCTRNGGDFSYKVLKKERVVYESKECHRARKRLRFLKDIEERIKADRESTEQEIGIELTRKSQNAEPYTRFQLKWFDEKQRIYEQRRVQRLKFDKYINDQKMLHKIVDEYFGKEPDTLVVYGAGFDFMNKGTFKGHRKFRHHDVIKIIKQRRNLSVYVINEAYTTKNCSYCHDRDRIQQKLSVSKSPHRYVHCSVCRKGIHRDKNGAKNILLKYENMKKLPISLSSIGTDMSLVDGGSSQGSLS

SEQ ID NO: 4492 - protein, 485 aa, Philereme vetulata
MPCPSCGKDDRQRSSSAKCLNRKRRVREIGLDSDQEVSVYTVKKGLTSVLCPLNDCKEAIVCAIRDDVREMSRLSIELSYLVNFFYKHYSTRDDFHLLLPKFDALQFTYALKGVKHKLTDPDNVISTYISLRRNNTFYDGRSRSFTIMQIAKQYSTILETNIQTHAFKRLKRYMYHKFGTDMDKSEVHSSTYDAYYNGGQNFKSKKAKKCEESLENTAAVGSKRNYSKVIAVDPGAKTPIVTCTRNGGDFSYKVLKKERVVYESKECHRARKRLRFLKDIEERIKADRESTEQEIGIELTRKSQNAEPYTRFQLKWFDEKQRIYEQRRVQRLKFDKYINDQKMLHKIVDEYFGKEPDTLVVYGAGFDFMNKGTFKGHRKFRHHDVIKIIKQRRNLSVYVINEAYTTKNCSYCHDRDRIQQKLSVSKSPHRYVHCSVCRKGIHRDKNGAKNILLKYENMKKLPISLSSIGTDMSLVDGGSSQGSLS

SEQ ID NO: 4493 - protein, 610 aa, Philereme vetulata
MPCPSCGKDDHQRSSSAKCLNRKRRVREIGLDSDQEVSVYTVKKGLTSVLCPLNDCKEAIVCAIRDDVREMSRLSIELSYLVNYFYKHYSTRDDFHLLLPKFDALQFTYALKGVKHKLTDPDNVISTYISLRRNNTFYDGRSRSFTIMQIAKQYSTILETNIQTHAFKRLKRYMYHKFGTDMDKSEVHSSTYDAYYNGVCKSNRIGEWFTENKINSKELKKNFWRFIPLFLRIQHELYDQGKLSFNVFPIYSHGLKFITYDSRCMHELLRRVDPNKTPSVWPVFSENTTMYWNRHFILPRKFGYSFSTDGVNVCLSMNRIVQKGQKFKSKKAKKCEESLENTAAVGSKRNYSKVIAVDPGAKTPIVTCTRNGGDFSYKVLKKERVVYESKECHRARKRLRFLKDIEERIKADRESTEQEIGIELTRKSQNAEPYTRFQLKWFDEKQRIYEQRRVQRLKFDKYINDQKMLHKIVDEYFGKEPDTLVVYGAGFDFMNKGTFKGHRKFRHHDVIKIIKQRRNLSVYVINEAYTTKNCSYCHDRDRIQQKLSVSKSPHRYVHCSVCRKGIHRDKNGAKNILLKYENMKKLPISLSSIGTDMSLVDGGSSQGSLS

SEQ ID NO: 4494 - protein, 610 aa, Philereme vetulata
MPCPSCGKDDHQRSSSAKCLNRKRRVREIGLDSDQEVSVYTVKKGLTSVLCPLNDCKEAIVCAIRDDVREMSRLSIELSYLVNFFYKHYSTRDDFHLLLPKFDALQFTYALKGVKHKLTDPDNVISTYISLRRNNTFYDGRSRSFTIMQIAKQYSTILETNIQTHAFKRLKRYMYHKFGTDMDKSEVHSSTYDAYYNGVCKSNRIGEWFTENKINSKELKKNFWRFIPLFLRIQHELYDQGKLSFNVFPIYSHGLKFITYDSRCMHELLRRVDPNKTPSVWPVFSENTTMYWNRHFILPRKFGYSFSTDGVSVCLSMNRIVQKGQKFKSKKAKKCEESLENTAAVGSKRNYSKVIAVDPGAKTPIVTCTRNGGDFSYKVLKKERVVYESKECHRARKRLRFLKDIEERIKADRESTEQEIGIELTRKSQNAEPYTRFQLKWFDEKQRIYEQRRVQRLKFDKYINDQKMLHKIVDEYFGKEPDTLVVYGAGFDFMNKGTFKGHRKFRHHDVIKIIKQRRNLSVYVINEAYTTKNCSYCHDRDRIQQKLSVSKCPHRYVHCSVCRKGIHRDKNGAKNILLKYENMKKLPISLSSIGTDMSLVDGGSSQGSLS

SEQ ID NO: 4495 - protein, 556 aa, Euplexia lucipara
MAACKTCGGPDHTRTSSKKCKNYLPPIRKRHLSESKANQLEIYTVKRGLASCLCPLLTPEKKLDLLTEIRRGVRDLSRVYIELGVWYNYYMKMSTQLPPKPDVLNFIYAMKGKGPYADAYIKMFGERKFDDKLRTFVVQEMAKQYETVLHTNISTHAYSRLARYFDVKRNDPVLFSAFYKKILPEDNEEMRRVCSIINVDTVGGTKWWSTIPEWLKIQAKLEDFRLFPQPSHGLKHITYTSRGWHELLRRVDPKSITSIWSRIIDHRRELWSPWLNVDMKKFGCSLQTDGFSVSLSMNRIKKEPSMAQSPKRSKKSYDRIIAVDPGSRIPVAAVESRRLKFQRVTKKYVRSHTLEWKRARVRNKLCSVGEEAEKKDREKLNFPVSSKNITHVVEYTVFRMHWFNVRQEPYERHAKLTRLRLDKYIRTAKCEEKIIKEIFDDSSNTLVLYGAGSSFMNKASFSGRKFKHDSLIKRLRSKPNIEVEVVDEQYTSQACSSCNATTGEFHKIVMNHRLRWGVCPNCNSEFDRDSNAAKNILINFTRSTLCRPGCSTNGAS

SEQ ID NO: 4496 - protein, 556 aa, Euplexia lucipara
MAACKTCGGPDHTRTSSKKCKNYLPPIRKRHLSESKANQLEIYTVKRGLASCLCPLLTPEKKLDLLTEIRRGVRDLSRVYIELGVWYNYYMKMSTQLPPKPDVLNFIYAMKGKGPYADAYIKMFGERKFDDKLRTFVVQEMAKQYETVLHTNISTHAYSRLARYFDVKRNDPVLFSAFYKKILPEDNEEMRRVCSIINVDTVGGTKWWSTIPEWLKIQAKLEDFRLFPQPSHGLKHITYTSRGWHELLRRVDPKSITSIWSRIIDHRRELWSPWLNVDMKKFGCSLQTDGFSVSLSMNRIKKEPSMAQSPKRSKKSYDRIIAVDPGSRIPVAAVESRRLKFQRVTKKYVRSHTLEWKRARVRNKLCSVGEEAEKKAREKLNYPVSSKNITHVVEYTVFRMHWFNVRQEPYERHAKLTRLRLDKYIRTAKCEEKIIKEIFDDSSNTLVLYGAGSSFMNKASFSGRKFKHDSLIKRLRSKPNIEVEVVDEQYTSQACSSCNATTGEFHKIVINHRLRWGVCPNCNSEFDRDSNAAKNILINCTRSTLCRPGCSTNGAS

SEQ ID NO: 4497 - protein, 464 aa, Euplexia lucipara
MSTQLPPKPDVLNFIYAMKGKGPYADAYIKMFGERKFDDKLRTFVVQEMAKQYETVLHTNISTHAYSRLARYFDVKRNDPVLFSAFYKKILPEDNEEMRRVCSIINVDTVGGTKWWSTIPEWLKIQAKLEDFRLFPQPSHGLKHITYTSRGWHELLRRVDPKSITSIWSRIIDHRRELWSPWLNVDMKKFGCSLQTDGFSVSLSMNRIKKEPSMAQSPKRSKKSYDRIIAVDPGSRIPVAAVESRRLKFQRVTKKYVRSHTLEWKRARVRNKLCSVGEEAEKKAREKLNFPVSSKNITHVVEYTVFRMHWFNVRQEPYERHAKLTRLRLDKYIRTAKCEEKIIKEIFDDSSNTLVLYGAGSSFMNKASFSGRKFKHDSLIKRLRSKPNIEVEVVDEQYTSQACSSCNATTGEFHKIVMNHRLRWGVCPNCNSEFDRDSNAAKNILINYTRFTLCRPGCSTNGAS

SEQ ID NO: 4498 - protein, 602 aa, Macaria notata
MPCPTCGKDDHARSSSSKCLNRKRRIREADFDSDQKVSVYNVKKGLTSILCPLSDCKEAIVCTIRDDVREMSRLSIELSYLVNFFYKHYSTRHTTVPFPAKFDALQFTYALKGCKYKIDDPDNVISAYMSLRKNNNKLYDGRLRSFTIMQIAKQYSKILETNIQTHAFKRLKRYMYHKFGTDMDKSVVHSSTYDAYYNGMCKSDGIGEWFTYNKINCNEMKKNFWKFIPLFLKIQHELYENKKPSFNVFTIYSHRLKFITYDSRCIHELLRRVDSTNTPSQWSVFSENAVMYWNRHFTLPRKFGYSFSTDGVSVCLSMNRIVEKDQKSKSKKVKSLAVVDKGNDTKLNYSKVIAVDPGAKTPIVTCTRNGDDFSYKVLKREGVMYESKEYHRVRKRLRFIKDIEERIRMDRESVEKETGFEVTRKSKNADIYTTFQLKWFDEKQKIYEQRRLQRLKFDKYINDQKMLNKIVDEYFGKEPDTLVVYGAGFDFMNKGTFKGHRKFRHNEILKIIKQRKNLSVFVINEAFTTKNCSYCHDRDRAHRKLNVSKSPHRYVHCSVCRKGIHRDKNGAKNILLKFEKNKLPIRLSSVGTDMNFTSGGSS

SEQ ID NO: 4499 - protein, 597 aa, Catocala fraxini
MLCKSCGGTDHSRRSSKYCANYLPPIRQRSNSGSASEDFDVAVVKRGFDGVLCPLLDGDLRQRLIAAIREDVIEISRVYILLGVFVNHCWNAYPAESSSARTFQDVMNYVYALKGKGPHAHRFDEMVHNHRTTIEHYDGRLRTFIVQEMVKTYMTVLKTNITTHAYSRLARYFKVKRNDPTLFAAYYRKEFGDDEISKVCRTINVSSDWHSTVPMWLRIQREMYERGDASFTVFPQPRHGLKHVTYTTRGWHELLRRVAPDATPTNWATIEDHKRTLWAPYLDTKAVDMSKFGCCIQTDGVAVSLSMNRKRNQKPTKPSLLKTYTDFFEDRIVAVDPGSRVPVAACDSRTGFKRITKRWVRSHTLEWKRDRYRNRILRPVELAEAADRERIERERGVRLTRRNAEHVKLYTDFRLKWFAARQRPFEQVRKLTRLPFDKYINTARTNEKIVRETFLGDTPSDLLLVLYGAGVNFVNVACFSGRKFKHTDLLRRMRSRRNIEVRLVDEAYTSKACSACNERDGIYTPLHMNHRLRRGVCPDCNVEFDRDYNAAKNILVNHTRSAFCRPSSSCVSSVPSDQASHSPIRSTFVCAELEPGT

SEQ ID NO: 4500 - protein, 375 aa, Catocala fraxini
MYERGDASFTVFPQPRHGLKHVTYTTRGWHELLRRVAPDATPTNWATIEDHKRTLWAPYLDTKAVDMSKFGCCIQTDGVAVSLSMNRKRNQKPTKPSLLKTYTDFFEDRIVAVDPGSRVPVAACDSRTGFKRITKRWVRSHMLEWKRERYRNRILRPVELAVAADRERIERERSVRLMRRNAEHVKLYTDFRLKWFAARQRPFGQVRKLTRLPFDKYINTARTNEKIVMETFLGDTPSDRVLVLYGAGVNFVNVACFSGRKFKHTDLLRRMRSRRNIEVRLVDEAYTSKACSACNERDDIYTPLRMNHRLRRGVCPDCNVEFDRDYNAAKNILVNHTRSAFCRPSSSCVSSVPSDQASHSPIRSTFVCAEVEPGT

SEQ ID NO: 4501 - protein, 597 aa, Catocala fraxini
MLCKSCGGTDHSRRSSKYCANYLPPIRQRSNSGSASEDFDVAVVKRGFDGVLCPLLDGDLRQRLIAAIREDVIEISRVYILLGVFVNHCWNAYPAESSSARTFQDVMNYVYALKGKGPHAHRFDEMVHNHRTTIEHYDGRLRTFIVQEMVKTYMTVLKTNITTHAYSRLARYFKVKRNDPTLFAAYYRKEFGDDEISKVCRTINVSSDWHSTVPMWLRIQREMYERGDASFTVFPQPRHGLKHVTYTTRGWHELLRRVAPDATPTNWATIEDHKRTLWAPYLDTKAVDMSKFGCCIQTDGVAVSLSMNRKRNQKPTKPSLLKTYTDFFEDRIVAVDPGSRVPVAACDSRTGFKRITKRWVRSHTLEWKRDRYRNRILRPVELAEAADRERIERERGVRLTRRNAEHVKLYTDFRLKWFAARQRPFEQVRKLTRLPFDKYINTARTNEKIVRETFLGDTPSDRVLVLYGAGVNFVNVACFSGRKFKHTDLLRRMRSRRNIEVRLVDEAYTSKACSACNERDGIYTPLHMNHRLRRGVCPDCNVEFDRDYNAAKNILVNHTRSAFCRPSSSCVSSVPSDQASHSPIRSTFVCAELEPGT

SEQ ID NO: 4502 - protein, 597 aa, Catocala fraxini
MLCKSCGGTDHSRRSSKYCANYLPPIRQRSNSGSASEDFDVAVVKRGFDGVLCPLLDGDLRQRLIAAIREDVIEISRVYILLGVFVNHCWNAYPAESSSARTFQDVMNYVYALKGKGPHAHRFDEMVHNHRTTIEHYDGRLRTFIVQEMVKTYMTVLKTNITTHAYSRLARYFKVKRNDPTLFAAYYRKEFGDDEISKVCRTINVSSDWHSTVPMWLRIQREMYERGDASFTVFPQPRHGLKHVTYTTRGWHELLRRVAPDATPTNWATIEDHKRTLWAPYLDTKAVDMSKFGCCIQTDGVAVSLSMNRKRNQKPTKPSLLKTYTDFFEDRIVAVDPGSRVPVAACDSRTGFKRITKRWVRSHTLEWKRDRYRNRILRPVELAEAADRERIERERGVRLTRRNAEHVKLYTDFRLKWFAARQRPFEQVRKLTRLPFDKYINTARTNEKIVRKTFLGDTPSDRVLVLYGAGVNFVNVACFSGRKFKHTDLLRQMRSRRNIEVRLVDEAYTSKACSACNERDGIYTPLHMNHRLRRGVCPDCNVEFDRDYNAAKNILVNHTRSAFCRPSSSCVSSVPSDQASHSPIRSTFVCAELEPGT

SEQ ID NO: 4503 - protein, 258 aa, Andricus quercusramuli
MKEKEVTYAEKYNGNEDRWKMYFDFFEIGRSKKKGHFSRTISIDSIGASTNFNNPTRAQESKTTAAPPVRVIYKKFWGCDSSKKGLVAGVKRTRGPMPSKDEETKDKLFYPLYEKRCVAWLKWANHMYVQREIDEPVNYIIGDEKKAPCFVMLEEIQMSNRTKGHVATPIKLAEKRLGESTRVHGSGKFKFVCVNKVFTTHMSSRCVGQCSIVSKKRQRYFFCPKCRTTWERDINAGRNILSIGLITEGIMKKTDIRE

SEQ ID NO: 4504 - protein, 304 aa, Andricus quercusramuli
MVNEKVEKPIKESTRLDTEEFKNIDTYAAVNFTRVIKYRLANFVFKQPLYEKRYVARLNWEKYHMYVQREVDKLVNYIIGDVKKAPCFVVLGEVNMSNRTKGHVAPPIRLVKKHLVERAIVHGLGKLKVSCVDEHCTTQMCSNCVGKCIVLSKNRHRFAFCQNCRTTWERDINAGINILKIGLITEGILKKTDVPNPDNFNSLKSLSPGPSLEIDSGSGLLGIPPNKQKMRLKLYPVDGVEKSHFILLIFITIQRSPPKGITRAIKIYAPGQTIHSLLYHRSGQTVSFIENYMKQSDDYKARHS

SEQ ID NO: 4505 - protein, 250 aa, Andricus curvator
MVAGVVRTGDPMPFKDDKTRDKPFYVRRSSFRWPTLHQKQRKMVYEKVEKLIKESKKLDTEEFKNIDTYLAVNFRTVTKYRLADFFFKQPRYEKRCVACLKWEKYMYIQREVEELVNYIIGDVKKAPCFVVLGELNMSNRTKGHVATPVRLVKKHVVERAIVHGPGKLKVLFLRNTAPLKCAVTVLKMHCGLAKPVSVRLLPNCRTKWERGINAGRNILNIGLITEGILKKTDIPNPDNFNALKSLSPGP

SEQ ID NO: 4506 - protein, 570 aa, Apotomis betuletana
MVCKSCGGTDHQRRSSKLCKNHLAPIRKRGVEDELHDVEVYVVKRGLRSALCPLLDDLMTNRLLREIRSDVAELSRIYIKLGIFIDFYFKTVNCDASIKSFQDILNFVYALKGKGPYAEAYARMIEGHHVSSYDGRLRSYIVQELAKQYWTVLKTNLTTHAYSRLVRYFKVKRSDRRLNDAFFEKRYTSDEDELNAVCRVINVDSPWYTTIPEWLRIQEAMIKRGDASFIIFPQPSHGLKHVTYTSKGWHELLRRVDPTSTPSDWTKITDHRQELWAPYLDSKTIDMKKFGCTVQTDGCSVSISMSRRMITTKKENLKKFKASYDRTVAVDPGSRVPIAACDDRYGFKRITKKWIRSHTLEWKRDRVRKKLLEKSETDERLDRERIEKELEVVLTPKSSSGAAHYATFRLKWFEARQKPFETHSKLTRLKLDKYINVTRTNERIVREVFLRYTPSDRVLVLYGAGSKFMNRATFSGRKFGHDDLLKKLRAKRNITVETVNEAYTSKACSACNARDGSFHRLKIDHRLRRGVCPDCNGAPLDRDYNAARNILINHTRSTFCRPSFAKYGGA

SEQ ID NO: 4507 - protein, 390 aa, Apotomis betuletana
MTTHAYSRLVRYFKVKRSDRRLYDAFFEKRYTSDEDELNAVCRVINVDSPWYTTIPEWLRIQEAMIKRGDASFIIFPQPSHGLKHVTYTSRGWHELLRRVDPTSTPSDWTKITDHRQELWAPYLDSKTIDMKNFGCTVQTDASYDRTVAVDPGSRVPIAACDDRYGFKRITKKWIRSHTLEWKRDRVRKKLLEKSETDERLDRERIEKELEVVLTPKSSSGAAHYATFRLKWFEARQKPFETHSKLTRLKLDKYINVTRTNERIVREVFLRYTPSDRVLVLYGAGSKFMNRATFSGRKFRHDDLLKKLRAKRNITVETVNEVYMSKACSACNARDGSFHRLKIDHRLRRGVCPDCNGAPLDRDYKAARNILINHTRSTFCRPSFTKYGGA

SEQ ID NO: 4508 - protein, 430 aa, Apotomis betuletana
MSFSVYPASIEKVTTNLTTHAYSRLVRYFKVKRSDRRLYDAFFEKRYTSDEDELNAVCRVINVDSPWYTTIPEWLRIQEAMIKRGDASFIIFPQPSHGLKHVTYTSRGWHELLRRVDPTSTPSDWTKITDHRQELWAPYLDSKTIDMKNFGCNVQTDGCSVSISMSRRMITTKKEKLKKFKASYDRTVAVDPGSRVPIAACDDRYGFKRITKKWIRSHTLEWKRDRVRKKLLEKSETDERLDRERIQKELEVVLTPKSSSGAAHYATFRLKWFEARQKPFETHSKLTRLKLDKYINVTRTNERIVREVFLRYTPSDRVLVLYGAGSKFMNRATFSGRKFRHDDLLKKLRAKRNITVETVNEAYTSQACSACNARDGSFHRLKIDHRLRRGVCPDCNGAPLDRDYNAARNILINHTRSTFCRPSFAKYGGA

SEQ ID NO: 4509 - protein, 570 aa, Apotomis betuletana
MVCKSCDGTDHQRRSSKLCKNHLAPIRKRGVEDELHDVEVYVVKRGLRSALCPLLDDLMTNRLLREIRSDVAELSRIYLKLGIFIDFYFKTVNCDASIKSFQDMLNFVYALKGKGPYAEAYARMIEGHHVSSYDGRLRTYTVQELAKQYWTVLKTNLTTHAYSRLVRYFKVKRSDRRLNDAFFEKRYTSDEDELNAVCRVINVDSPWYTTIPEWLRIQEAMIKRGDASFIIFPQPSHGLKHVTYTSRGWHELLRRVDPTSTPSDWTKITDHRQELWAPYLDSKTIDMKKFGCTVQTDGCSVSISMSRRMITTKKEKLKKFKASYDRTVAVDPGSRVPIAACDDRYGFKRITKKWIRSHTLEWKRDRVRKKLLEKSETDERLDRERIQKELEVVLTPKSSSGAAHYATFRLKWFEARQKPFETHSKLTRLKLDKYINVTRTNERIVREVFLRYTPSDRVLVLYGAGSKFMNRATFSGRKFRHDDLLKKLRAKRNITVETVNEAYTSKACSACNARDGSFHRLKIDHRLRRGVCPDCNGAPLDRDYNAARNILINHTRSTFCRPSFTKYGGA

SEQ ID NO: 4510 - protein, 287 aa, Apotomis betuletana
MSKFRLSTIQTDGCSVSLSMTRVVKKSQINSSAKKSKQRTSTVTVDPGRRVPIAACDERYGFKRVTKKWVRSHTREWKRERVRNKLLYDSETAERLDRERVERELEICVTNKRSLYVNWYAYYRLKWFELRQKLFETHSKLTRLKFDKYINIARTNERIVREIFLADAPSDSSTRLVLYGAGSKFMNRATFSGRKFRHDDLLKRLRARRNITVETVDEHYTSKACSACNARDGSYHRLKIDPKLRRGVCPDCNGASLDRDYNAARNILINHTRSTVCRPCSVTNAGA

SEQ ID NO: 4511 - protein, 267 aa, Diarsia rubi
MSMNRAVVVNNQQTIKKRAKPTYDRIVAVDPGSRVPVAAVDSKMYRFQRITKKYVRSHTLEWKRERVRNKLIKSIEEAEQKERETFKFPVSSKNTSHVMEYTLFRMKWFDARQSVYELHSKLTRLKLDKYIRTAQCEERIIKQVFDGGGGGVERVLVLYGAGSKFMNSATFSGRKFKHDSLIRRLRSKKNINVEIVDESYTSQACSSCNEKTGAFKKIIMNHKLRWGICPNCHKEFDRDANAAKNILINYKRSTICGPGCVEMIHAS

SEQ ID NO: 4512 - protein, 1637 aa, Diarsia rubi
MDTQQAVVDQIVQNLAFDVEAIPKNKSIQTTSISKSAPLNLKIKVRKKDEIQKHNDVLWVANDTSETAQKVRLVNSGHNIMAFDVFMEAEFEKKARKPHKHFFDMLRPGKCLRAVDDDKCPYMPSSSYSANITEPTKATKSDGTFKQTCILSKNVYQDYSVLTQQAEPKWLFGKCKPGGCLDPPFSEDKYSYKPSTKSGPEREEENLLDEQIVRSDVCNKQPVITQDDETESNERHSSIFEKGVFKKKRRSKDKSTNAQLPDKTDSIVDIYQGKSVTNSSSTRSNSIITYPPKTKSIPRLSDDKTGESRDPSEVKPRMSFNDHSEPCFIPPKGVLRIKEKDTSDPSDNPKHESSDVTEHPVNESFKMPVPLPIPVPIPISIIYRTQKPKDIDINDDLLTTEGDNANVTVYKLTKQESQEQEKDSTTPQLKREKSATADVADKPLDSSKTESFSCNVEQPTAPNELGDKNIKEPFKEIYSENNMKDTGFPNKDEKIYSPIPILAPISLNVSDSTKGGFSDQENDTVTKPPVIAEMQEKRNSKLEEITESMDKPTKQNDIKDDDTVDKKDEIKPAIIAEAQEKRNSKLEEITESMNKPTIQNDIKDDNTVDKKNETKPLIIVESQEKRNSKLEEITESMDKSTKQNNIKDGDTVNKTDEPKKGERKDSQRLSQSKLPNLKDKGVTKRRDNPYKNFDTFEDSGTDIGSLLSESKTSIVSAKGNEDKKRSVSPGKSLDNIGGRDTDLGVRTDKKRTSLPSGLMHKSDSGNGKITESVNNSNIDSYTKSEPEFPNADNVNFIVGPIIIDNIKPSPKSLKVKEVDSVSNIQAEPVERKYDPPPELIPPTPAQKHTERISSTDKRIDTGLPSIQSTSTLKSAMKKDAITVDLGFHSYINDKNERILRTFDAANSPKRLSNDSVTVIKTQMRISSNGIRIPVDSENDMYIQIKKSNANQRVSTSESGLVSDIGSRGKKQKSPSLCNAFTQLRVCWGRLTVYPDAAEYQYFTWSDCLSDLHNPVNIRSSDLLTKIKTFKLYALNVTKSAKQKKTIVQWRGERDGEMRSSERIVEEKKDSTIEMDAMDDHFIIDYYEQELVPLQLIIKELRNEIDVLAEQQVLFKDKFACPKQTRLVHANKKCYECLSHTSASVFIYIMPTITTCGCKTCGGLDHIRISSKLCKNHLPSVRKRNLIDATAKIEIYNIKRGLVSMLCPLLEEERKLRLLNEIRRDVKDLSRVYIELGIWINYYIKTTSSFPEKPDILNFIYAMKGKGPYVDSYQQCFGASRIYDGRLRTFVVQEMAKQYETVLHTNISTHAYSRLARYFKVKRNNQDLFNAFYKKIFPSNNEEITRVCSIINVDSVKGSKWWNTIPEWLKIQETLQDFKLFPQPSHGLKHITYTSRGWHELIRRVDPTAISSYWTKINNHMRELWTPWLDVNTKKFGCTIQTDGISVSMSMNRAVVVNKKQTTIKRAKPTYDRIMAVDPGSRVPVAVVESKMYKFQRITKKYVRSHTLEWKRERVRNKFTKSIEEAEQKERESFKFPVSSKNTSHVMEYTLFRMKWFEARQSPYELHSKLTRLKLDKYIRTAQCEERIIKQVFDGGGGGVGVERILVLYGAGSKFMNSATFSGRKFKHDSLIRRKIKE

SEQ ID NO: 4513 - protein, 292 aa, Diarsia rubi
MSTILPVSWLDVNTKKFGCTIQTDGISVSMSMNRAVVVNKKQTTIKRAKPTYDRIMAVDPGSRVPVAVVESKIYKFQRITKKYVRSHTLEWKRERVRNKFTKSIEEAEQKERESFKFPVSSKNTSHVMEYTLFRMKWFEARQSPYELHSKLTRLKLDKYIRTAQCEERIIKQVFDEGGGGVGVERILVLYGAGSKFMNSATFSGRKFKHDSLIRRLRSKNNIDVEIVDESYTSQACSSCNEKTGAFKKIIMNHKLRWGICPNCHKEFDRDANAAKNILINYKRSTICGPGCV

SEQ ID NO: 4514 - protein, 562 aa, Diarsia rubi
MPTITTCGCKTCGGLDHIRISSKLCKNHLPSVRKRNLIDATAKIEIYNIKRGLVSMLCPLLEEERKLRLLNEIRRDVKDLSRVYIELGIWINYYIKTTSSFPEKPDILNFIYAMKGKGPYVDSYQQCFGASRIYDGRLRTFVVQEMAKQYETVLHTNISTHAYSRLARYFKVKRNNQDLFNAFYKKIFPSNNEEITRVCSIINVDSVKGSKWWNTIPEWLKIQETLQDFKLFPQPSHGLKHITYTSRGWHELIRRVDPTAISSYWTKINNHMRELWTPWLDVNTKIFGCTIQTDGISVSMSMNRAVVVNKKQTTIKRAKPTYDRIMAVDPGSRVPVAVVESKMYKFQRITKKYVRSHTLEWKRERVRNKFTKSIEEAEQKERESFKFPVSSKNTSHVMEYTLFRMKWFEARQSPYELHSKLTRLKLDKYIRTAQCEERIIKQVFDGGGGGVGVERILVLYGAGSKFMNSATFSGRKFKHDSLIRRLRSKNNIDVEIVDESYTSQACSSCNEKTGAFKKIIMNHKLRWGICPNCHKEFDRDANAAKNILINYKRSTICGPGCV

SEQ ID NO: 4515 - protein, 263 aa, Diarsia rubi
MSMNRAVVVNKKQTTIKRAKPTYDRIMAVDPGSRVPVAVVESKMFKFQRITKKYVRSHTLEWKRERVRNKFTKSIEEAEQKERESFKFPVSSKNTSHVMEYTLFRMKWFEARQSPYELHSKLTRLKLDKYIRTAQCEERIIKQVVDGGGGGVGVERILVLYGAGSKFMNSATFSGRKFKHDSLIRRLRSKNNIDVEIVDESYTSQACSSCNEKTGAFKKIIMNHKLRWGICPNCHKEFDRDANAAKNILINYKRSTICGPGCV

SEQ ID NO: 4516 - protein, 369 aa, Epinotia nisella
MQQELTEHNVKSFNVFPIYSHGLKYISYDSRCLHELLRRIDPKNTPSTWSEFSIDTKKYWNRWFNIPKNFGYSFSTDGVCVSLSMNRIIEKKDKFKSKRVKTDEVKVFNNEQLNRPYKRIIAVDPGAKTPIVTCTRNGNDSFNYKILKKQRVMYETKEHSREKKRLKYVKDIDERIKHDRELLNNKLGYEISRKNKHIHEYMQFQLKWFDEKQKLYEQRRVQRLKFDKFINDQVTNNKIVDEYFGKEPETLVVYGSGFDFMNKCSFKGHRKFRHNDIIKIIKQRKNLSLYIINEAFTTKNCSKCYESKKQNILQVSKSPHRYVYCSICRKGIHRDKNGAKNILLKYEYKLPSILSFTGTDMDITQGPLS

SEQ ID NO: 4517 - protein, 327 aa, Epinotia nisella
MKVHSFRLFPQPSHGLKHVTYTSRGWHELLRRVAPETVPSEWPNITDHIRQLWAPWLNLPSKFGCCLQTDGVSVSVSMNRIVREKPPPNKRTRFQYDRIVAVDPGSRVPIASVESKMLAYKRITKKYVRSHTLEWKRERVRNKILNPILDAMQQERSSFSFPVSSKNTDHVIEYTAFRIKWFEAMQIPYEQYSKLTRFGLDKYMRSAQCQERIVKDVFDGGGIEKVLVLYGAGSKFMNRASFSGRKFKHDSLLKRLRAKANIHVEIVEESYTSQACSTCKERTGEFVKIGMDRRLRWGTCPVCHSEFDRDENAAKNILINHTRSTIL

SEQ ID NO: 4518 - protein, 249 aa, Epinotia nisella
MNRILKEKPHTIPSKRAKIHHDRIVAVDSGSRVPLATVESHRHAFKRITGKYVRSHTLEWKRERVRRKLLTPVLDAMQRERSKFTFPVSSKNTQHVIEYTKFRVKWFDAMQVPYEQNPKLTRHGLDKYMRTARCEERITREVFDGGGVENVLVLYGAGSKFMNTALFSGRKFKHDSLLRRLRSKRNITVEVVDEAHTSQACSSCNQKTGEFCKMCHSEFDRDANAAKNILINHIRSTICRPICPKNGIS

SEQ ID NO: 4519 - protein, 476 aa, Epinotia nisella
MKTCGTTLPAKPDVLRFIYAMKGKGPYADAYNKLFGVRKYDGKLRTFIVQELAKQYETTLHTNISTHAYSRLARYFQVKRNDKRLYNAFYKKMLPDGDDDISREIASVCATVNVDSVKGTMWWSTVPEWMRIQDCMKVNSFRLFPQPSHGLKHITYSSRGWHELLRRVAPATITSEWSKITDHLRQLWAPWLDLSANTKFGCRLQPDGISVSMSMNRILKEKPHTIPSKWAKIHHDRIVAVDPGSRVPLSTVESHRHAFKRITRKYVRSHTLEWKRERVRRKLLTPVLDAMQRERSKFTFPVSSKNTQHVIEYTKFRVKWFDAMQVPYEQNPKLTRHGLDKYMRTARCEDRIAREVFDGGGVENVLVLYGAGSKFMNTALFSGRKFKHDSLLRRLRSKRNITVEVVDEAYTSQACSSCNQKTGEFCKIGMNHRLRWGVCPTCHSEFDRDANAAINILINHIRSTICRPRCPKNGIS

SEQ ID NO: 4520 - protein, 378 aa, Epinotia nisella
MPEDNAEIARVCAIINVDTVKGTRWWSTISEWMRIQDAMKVHSFRLFPQPSHGLKHVTYTSSGWHELLRRVAPETVPSEWPNITDHIRQLWAPWLDLPSKFGCCLQTDGVSVSVSMNRIVREKPPPNKRTRFQYDRIVAVDPGSRVPIASVESKMLAYKRITKKYVRSHTLEWKRERVRNKILNPILDAMQQERSSFSFPVSSKNTDHVIEYTAFRIKWFEAMQIPYEQYSKLTRFGLDKYMRSVQCQERIVKDVFDGGGIEKVLVLYGAGSKFMNRASFSGRKFKHDSLLKRLRAKANIHVEIVEESYTSQACSTCNERTGEFVKIGMDRRLRWGTCPVCHSEFDRDENAAKNILINHTRSTICRPRYPPRKDIVTS

SEQ ID NO: 4521 - protein, 558 aa, Epinotia nisella
MVGCKSCGGSDHQRRSSVKCGNYLPPIRKRNLENSQNFEVYVVKRGLNSLLCPLLAVQQRARLLEEIRRDVRDLSRLYIELGIFYNMYMKTTDTIPSKPDVLNFIYAMKGKGPYAATYTKYFGGRKYDGKLRSYTVQEMAKQYETTMHTNVATHAYSRLARYLQVKRNDERLYNAFFKKVMPEDNAEIARVCAIINVDTVKGTRWWSTISEWMRIQDAMKVHSFRLFPQPSHGLKHVTYTSRGWHELLRRVAPETVPSEWPNITDHIRQLWAPWLNLPSKFGCCLQTDGVSVSVSMNRIVREKPPPNKRTRFQYDRIVAVDPGSRVPIASVESKMLAYKRITKKYVRSHTLEWKRERVRNKILNPILDAMQQERSSFSFPVSSKNTDHVIEYTDFRIKWFEAMQIPYEQYSKLTRFGLDKYMRSAQCQERIVKDVFDGGGIEKVLVLYGAGSKFMNRASFSGRKFKHDSLLKRLRAKANIHVEIVEESYTSQACSTCNERTGEFVKIGMDRRLRWGTCPVCHSEFDRDENAAKNILINHTRSTICRPRYPPRKDIVTS

SEQ ID NO: 4522 - protein, 526 aa, Epinotia nisella
MYKFTSSNEDYVRACAPCCLSSSVPVFWRKLNATYETCPGSTLGIFYNAYMKTCGTTLPAKPDVLRFIYAMKGKGPYADAYNKLFGVRKYDGKLRTFIVQEIAKQYETTLHTNISTHAYSRLARYFQMKRNDKRLYNAFYKKMLPDGDDDISREIASVCATVNVDSVKGTMWWSTVPEWMRIQDCMKVNSFRLFPQPSHGLKHITYSSRGWHELLRRVAPATITSEWSKITDHLRQLWAPWLDLSANTKFGCRLQTDGISVSMSMNRILKEKPHTIPSKRAKIHHDRIVAVDPGSRVPLATVESHRHAFKRITRKYVRSHTLEWKRERVRRKLLTPVLDAMQRERSKFTFPVSSKNTQHVIEYTKFRVKWFDAMQVPYEQNPKLTRHGLDKYMRTARCEERITREVFDGGGVENVLVLYGAGSKFMNTAVFSGRKFKHDSLLRRLRSKRNITVEVVDEAYTSQACSSCNQKTGEFCKIGMNHRLRWGVCPTCHSEFDRDANAAKNILINHIRSAICRPRCPKNGIS

SEQ ID NO: 4523 - protein, 369 aa, Epinotia nisella
MQQELTEHNVKSFNVFPIYSHGLKYISYDSRCLHELLRRIDPKNTPSTWSEFSIDTKKYWNRWFNIPKNLGYSFSTDGVCVSLSMNRIIEKKDKFKSKRVKTDEVKVFNNEQLNRPCKRIIAVDPGAKTPIVTCTRNGNDSFNYKILKKQRVMYETKEHSREKKRLKYVKDIDERIKHDRELLNNKLGYEISRKNKHIHEYMQFQLKWFDEKQKLYEQRRVQRLKFDKFINDQVTNNKIVDEYFGKEPETLVVYGSGFDFMNKCSFKGHRKFRHNDIIKIIKQRKNLSLYIINEAFTTKNCSKCYESKKQNILQVSKSPHRYVYCSICRKGIHRDKNGAKNILLKYEYKLPSILSFTGTDMDITQGPLS

SEQ ID NO: 4524 - protein, 706 aa, Diachrysia chrysitis
MAFTIIPNYNIKVVINHTNASCTITEYQNKDIIVYLLSDFTNNNSPLSDKSVVAQLYPGVITNLIFPQDVLNLNQCLQVWMCDEASVERGKMYNVKLTKVRLNYHTYKDDFVWAQQYAFVVENPEHARKIYKGSPIFLNNWLVSLVTTFEHDPITGATVFIVTGGQFGKFTVGNVKFNGKVSFEKLLDTHTVCRGKKKTAVAEEEYFSLRPKAPQKYDGKHRSFLITSMAKDYETALKNAVCVHAESRIARYLAAAVQSSDCKLKLYQWKRIVYEELIRGRGPIREEIHELREEFGGAFDLEKNWWKYVPIFYKIGRYLHEKNLKSFNLFPVYAPGVKHVRYDAMGLYELLASCNKISRIKAVDFRAATPLYWSMYFKLDKYLDADARVRWCNDKTFGMSITTNGVDVSISMQRRRRRKLQKAKKPRPMEEKEEFTRILGVDPGLVQFIGGCLIDRDAETETNILVRGKSFNNASVCRWRRVRKIYEIDKAFKESCAGGIDGYSSKIGYGNLSIYTRLTLAFMRERQRSYEQRIRKRWDEKICKRRALDRLVDSLLSRSRRTLVCFGDGGGAGQKNIKYGHARPPKRALESAFARRRRDCRLVAAVDEYNTTKRCAKCCGVLKTAQSPHRYQICPNCNVVWNRDVNAARNIALIGTFAADVIPNVFLRQQRNDDNNVATQCVGWPEFESHLYVRSKFVSLEARCSV

SEQ ID NO: 4525 - protein, 559 aa, Diachrysia chrysitis
MENDLGGCRKTRPPPLDAQALVPPNWQPHMVFIAPTPEPRSEPLWRLGKKKTAVAEEEYFSLRPKAPQKYDGKHRSFLITSMAKDYETALKNAVCVHAESRIARYLAAAVQSSDCKLKLYQWKRIVYEELIRGRGPIREEIHELREEFGGAFDLEKNWWKYVPIFYKIGRYLHEKNLKSFNLFPVYAPGVKHVRYDAMGLYELLASCNKISRIKAVDFRAATPLYWSMYFKLDKYLDADARVRWCNDKTFGMSITTNGVDVSISMQRRRRRKLQKAKKPRPMEEKEEFTRILGVDPGLVQFIGGCLIDRDAETETNILVRGKSFNNASVCRWRRVRKIYEIDKAFKESCAGGIDGYSSKIGYGNLSIYTRLTLAFMRERQRSYEQRIRKRWDEKICKRRALDRLVDSLLSRSRRTLVCFGDGGGAGQKNIKYGHARPPKRALESAFARRRRDCRLVAAVDEYNTTKRCAKCCGVLKTAQSPHRYQICPNCNVVWNRDVNAARNIALIGTFAADVIPNVFLRQQRNDDNNVATQCVGWPEFESHLYVRSKFVSLEARCSV

SEQ ID NO: 4526 - protein, 634 aa, Diachrysia chrysitis
MGCCAACGGTDHTRRSSVKCKQHIPPQRKRFAPQESQQTLYDYETYTIKRGLRKFCKDAEIIAKIKEDARQVSALAVESSIYLHHHYTRLLESQSAVAWPDKYNVLYFFYRLQGKKKTAVAGGEEEEYFSLRPKAPRQYDGKHRSFLITSMAKDYETALKNAVCVHAESRIARYLAAAVQSSDCKLKLYQWKRIVYEELIRGRGPIREEIHALREEFGRAAATFDLEKNWWKYVPIFYKIGRYLHEKNLKSFNLFPVYAPGVKHVRYDAMGLYELLASCNKISRIKAVDFRAATPLYWSMYFKLDKYLDADARVRWCNDKTFGMSITTNGVDVSISMQRRRRRRKPQTAKKPRPLEEKEEFTRILGVDPGLVQFIGGCLIDRDAETETNILVRGKSFNNASVCRWRRVRKIYEIDKAFKDSCAAAIDGYSSKIGYGNLSIYTRMTLAFMHDRQRSYEQRIRKRWDEKICKRRALDRLVDSLLSRSRRTLVCFGDGGGAGQKNIKYGHARPPKRALESAFARRRRDCRLVAAVDEYNTTKICSKCCGVLKTSRSPHRYQICPNCNVVWNRDVNAARNIALAGLFPDAKPDVFLRQEQQRNDDDDDVATQRVGWPEFESHAYVRSKFVSLEAKCWV

SEQ ID NO: 4527 - protein, 625 aa, Diachrysia chrysitis
MGCCAACGGTDHTRRSSVKCKQHIPPQRKRFAPQESQQTLYDYETYTIKRGLRKFCKDAEIIAKIKEDARQVSALAVESSIYLHHHYTRLLEQESTAAWPDKYNVLYFFYRLQGKKKTAVAEEEYFSLRPKAPQKYDGKHRSFLITSMAKDYETALKNAVCVHAESRIARYLAAAVQSSDCKLKLYQWKRIVYEELIRGRGPIREEIHALREEFGGGVAFDLDKNWWKYVPVFYKIGCYLHEKNLKSFNLFPVYAPGVKHVRYDAMGLYELLASCNKISRIKAVDFRAATPLYWSMYFKLDKYLDADARVRWCNDKTFGMSITTNGVDVSISMQRRRRRRKLQTPKKPRILEEREEFTRILGVDPGLVQFIGGCLIDRDAETETNILVRGKSFNNASVCRWRRVRKIYEIDKAFKDSCAAAAIDGYSSKVGYGNLSVYTRMTLAFMHDRQRSYEQRIRKRWDEKICKRRALDRLVDSLLSRSRRTLVCFGDGGGGGAGQKYGHAKPPKRALESAFARRRKDCRLVAAVDEYNTTKICAKCCGVLKTSRSPHRYQICPNCNVVWNRDVNAARNIALAGLFADAKPDVFLRQQRNDDVATQRVGWPEFESHTYVRSKFVSLEARCWV

SEQ ID NO: 4528 - protein, 477 aa, Diachrysia chrysitis
MKTKSVGNHVTLLYAESRIARYLAAAVQSSDCKLKLYQWKRIVYEELIRGRGPIREEIHALREEFGRAAATFDLEKNWWKYVPIFYKIGRYLHEKNLKSFNLFPVYAPGVKHVRYDAMGLYELLASCNKISRIKAVDFRAATPLYWSMYFKLDKYLDADARVRWCNDKTFGMSITTNGVDVSISMQRRRRRRKPQTAKKPRPLEEKEEFTRILGVDPGLVQFIGGCLIDRDAETETNILVRGKSFNNASVCRWRRVRKIYEIDKAFKDSCAAAIDGYSSKIGYGNLSIYTRMTLAFMHDRQRSYEQRIRKRWDEKICKRQALDRLVDSLLSRSRRTLVCFGDGGGAGQKNIKYGHARPPKRALESAFARRRRDCRLVAAVDEYNTTKRCAKCCGVLKTSRSPHRYQICPNCNVVWNRDVNAARNIALAGLFADAKPDVFLRQERNNDVATQRVGWPEFESHTYVRSKFVSLEARCWV

SEQ ID NO: 4529 - protein, 484 aa, Diachrysia chrysitis
MAKDYETALKNAVCVHAESRIARYLAAAVQSSDCKLKLYQWKRIVYEELIRGRGPIREEIHALREEFGRAAATFDLEKNWWKYVPIFYKIGRYLHEKNLKSFNLFPVYAPGVKHVRYDAMGLYELLASCNKISRIKAVDFRAATPLYWSMYFKLDKYLDADARVRWCNDKTFGMSITTNGVDVSISMQRRRRRRKPQTAKKPRPLEEKEEFTRILGVDPGLVQFIGGCLIDRDAETETNILVRGKSFNNASVCRWRRVRKIYEIDKAFKDSCAAAIDGYSSKIGYGNLSIYTRMTLAFMHDRQRSYEQRIRKRWDEKICKRRALDRLVDSLLSRSRRTLVCFGDGGGAGQKNIKYGHARPPKRALESAFARRRRDCRLVAAVDEYNTTKICSKCCGVLKTSRSPHRYQICPNCNVVWNRDVNAARNIALAGLFPDAKPDVFLRQEQQRNDDDDDVATQRVGWPEFESHAYVRSKFVSLEAKCWV

SEQ ID NO: 4530 - protein, 541 aa, Chlamydomonas reinhardtii
MLQEACALVSTSTRPQQRESVMAHFYAMHFAPLLVEAACGPPVDITAHHQLAHHLLQDVLTNLEQHYCANFMRWVRKWSRAVLEVPDEQLPPAPAADDDDEEEEDDDNEEEEVRSGTGMGSKADAGARVFKALASLMTAALMGWRELPLTEGDMGGLAVPAGLLDRANVKATALVQTWKARGLHPVQAGQQRLLDRDPLLLVSAAADLLRDILPRHRWLVSEYRRLRTAALPPPRGELVKAKFAARRTKPFSLVVEASLMPLHVPITNTVLQEVLINREVLVVAWEAAAAAERDNGQTGRRLWLQARLKEQPALKRCQAGIPSARVASAADHERRIRYLYSGGGVDAAAAAGSAPAPVQQYGLWHLLRFYRQWGQRRWRLTVHVRTQKVLEHTAQQLAGGRPKEEVIVGWGNANTGYGGCISRLGRGPNRALLRLLVDKYAHLVVYVDEFYTSQGRDVNSATNIRHALVEMLLGHKRPASLQTGGGGGGGGGSGGGGGSGGGGGSGSGGGACAHLGSGGGGKGHVEEESAAPPKKRRKRAG

SEQ ID NO: 4531 - protein, 200 aa, Chlamydomonas reinhardtii
MFCNKVGVHLSEGPAEAAGPAEAGPRGAVHVLWHYHFSAFRRRRWAAFIQRDRALHRAAKQLTGGRAKEEVVVGWGSWAFQGGKGGSPISVRGGRAPTGRLIKLLRERYAKHVFIIDEYKTSKTCYNCGCQEMAIKRLGGLKEGQRPWSVKVCNDCLTTWNRDVSAANVIRVLLLLKLMGFERPTKLQRPPWPPPAAGPG

SEQ ID NO: 4532 - protein, 287 aa, Chlamydomonas reinhardtii
MLLLSNKRSAQDRAANRVMRALTHGLPKERPLVIGVGSASFSPTAGGGALAAPNTAMREALSRVAQRERQATGRSVKIVPVWEHRTTLCCSTCGAETQGAWVRRNGVLRRSGRIRYCTECGTSRDRDVQGARNMLRIVEDEYDGRGRPLYLCRQEHLPKPPPMAPAVPLAVIDALSALQAEGDVAARRAAQAVAAAMEQQVVEASGGNSLVGEPQLQAIDARLAAGPPAEVMDAASGRPRGTVAVIDALSALQAEGDVAAQRAAQAVAAAMEQQVVEASGGDSLVGA

SEQ ID NO: 4533 - protein, 232 aa, Chlamydomonas reinhardtii
MNAMTRLRSAALQAYVGGIPTAATASAARFEERLRYLFASGAAGQAAGQEAGQAEAAGQAEAAGPAEAGPRGAVHVLWHYHFSAFRRKRWAAFIQRDRALHRVAKQLTGGRPKEEVVVGWGSWAFQGGKGGSPISVRGGRAAKHVFIIDEYKTSKTCYNCGCHEMAIKRLGGLKEGQRPGSVKVCNVCLTTWNRDVSAANVIRVLLLLKLMGFEQPTKLQRPPWPPAAAGPG

SEQ ID NO: 4534 - protein, 570 aa, Chlamydomonas reinhardtii
MSTPPKLQMSDFPQELFDEIEKKIETKIEKKIERMIDKKIEAKVREELQKQLPRGLVQLLWESPRGNAPLLFGLSAVLLLMPAVKRFVVPAVKRWVRKWSRAVLEVQLPPALAADDDDDDEEEDDDDEEEEVRSGPGMGSKADAGARVFKALASLMTAALMGWRELPHTEGDMGGLAVPAGLLDRANVKATALVQTWKAPGLHPDQAGQQRLLDRDPLLLVSAAADLLRDILPRHRWLVSEDRRLRTAAPPPPRGELVKAKFAARRTKPFSLVVEASLMPLHVPITNTVLQEVLINREVLVVAWEAAAAAERDNGQTGRQLWQQARLKEQPALKRCQAGIPSAQVASAADHELRIRYLYSGGGVDAAAAAGSAPAPVQQYGLWHLLRFYRQWGQRQSRLTVHVRTQKVLEHTAQQLAGGRPKEEVIVGWGNANTGYGGCISRLGRGPNRALLRLLVDKYAHLVVYVDEFYTSQGRDVNSATNIRHALVEMLLGHKRPSSLQTGGGSGGGGGGSGSGGGGSGSGSGGSGSGGGGSGSGGGACAHLGSGGGGKGHEEEESAAPPKKRRKRAG

SEQ ID NO: 4535 - protein, 235 aa, Chlamydomonas reinhardtii
MAAPGDNPVPGVVAAGDPLAVFELATLSTMRIVGVDPGVGNYLVACQTGRRLWQQARLEEQPALKRCQAGIPSARVASAAEHELRIRHLYSGGGVDAAAAAGSAPAPVQQYGLWHLLRFYRQWGQRRWRLTVHVRTQKVLEHTAQQLAGRRPKEEVIVGWGNANTGYGGCISRCVRSAGGAYSATGSAACRLAAAAAAAAAGVRARILVAEGAGKATHVEEESAAPPKKRRKRAG

SEQ ID NO: 4536 - protein, 537 aa, Chlamydomonas reinhardtii
MDSVGCEAELQDQLLWCFLNPLQIAASKSFVCGRMRRDVEGLPANSGRPDFLLLSGDRNTVLVAVEVKTSAALWVPPGRSLPDVYAEAGKNSKIVKAVHQLYSYLDRVPYGVLLTDKQLFCMRREHDELLCSPSIPLTAEQGEAAAGGFGAGSLTAAAALYCTLRWSQAWCTSSQLFPGYRPDPQVPGHTPRRLAESSSAVVLQGELGGRAAAVKMVDLWQGSEGKKLLQHEARMYQALQPLQGSYVPRLLGYGSCDGWQFFVATSLEGPSLNLEDGWALGEAATRAGALAALDAVHACGVLHGDIALRNFALAASHSPPLGMGGGGAAGGAGGEGGSAGQQQPCVMLLDFGHAQLVTTAAEKFGEEPAELFRRERQELQQLLGSEVRTAILGNGCAVALHRVAKQLTGGRPKEEVVVGWGSWAFQGGKGGSPISVRGGRAPTGRLIKLLRECYAKHVFIIDEYKTSKEMAIKRLGGLKEGQRPWSVKVCNDCLTTWNRDVSAANVIRVLLLLKLMGFERPTKLQRPPWPPAAAGPG

SEQ ID NO: 4537 - protein, 604 aa, Chlamydomonas reinhardtii
MTADTTSRSVEAARSHASFFLVRAQPPVDAFGPGLEARRDQLGAQVQQLTQAQPLTREDTQRLASLRRELHRARPFTLTPSPSFAPIYVPLDNTSMARLPGLLPTLARRHGEVFAGAGAGAVAPSSFVQAAFGGGGMQSSATLNAVGWGLFQLGGVTSRNAPFANYITTDGVACSVAREAHNKPLANLKPATAPADAGELCTLEEMKATQIIGVDPCGGGNWFMAARSPLYQPGPWAWEGVGPAQRYLLELHDKQLDEELFPGQLPPEPRRRRKGGGRKGGGRTGGHRRKQSKHWQPRARTARRRRQKRGRFHMSMGHWRHMSGLERLQPNRPQLAPALQAYTGGIPTAATASAARFEERLRYLFASGAAGQAAGQAAGQAAGQAAGQAAGQAAGQAAGQAAGQAAGQAAGQAAGQAAGQAAGQAEAGPRGAVHVLWHYHFSAFRRKRWAAFIQRDRALHRVAKQLTGGRPKEEVVVGWGSWAFQGGKGGSPISVRGGRAPTGRLIKLLRERYAKHVFIIDEYKTSKTCYNCGCQEMAIKRLGGLKEGQRPWSVKVCNDCLTTWNRDVSAANVIRVLLLLKLMGFERPIKLQRPPWPPAAAGPG

SEQ ID NO: 4538 - protein, 1876 aa, Chlamydomonas reinhardtii
MAGSSDSTDAEPVAGWFLSVLFLLFMGISIAWQIFIALITFLNSFYGGAKTIWLTRLKEEVLDVGVISLVLVFVYPYIAGICVDSTSTSSYPASGSKYPLPPSAVPAADAPPSLPRALLAAGARALLDGSLGHDGHMDPGRGYAAAGEALLTDGLGPGPGAGAGAGVGVGAGVGVGGRRGLAEQLVSGLAVAVRRGLAGGGSAAACPEGQQHLFPAGSISNAHYLLFFVALVHIVYSLFTFTLTLQRFTFWSKWERRARLEAMDAAEVLESPDPPTWYCRPFVHGLRYLQGGIDRDRYMVLRGLFQLRSRAHRVKAFVDNLHYTNVCENAMEIDIAKMVAHGWLQALIVAIFTLYPTVVYQILWIGGASILVQVIVVAKMESVVSKVLRIVRVAGSQAAPEYHIDTAAEEYQELTDASFDDEEELPPSSSSSSSAEDWDDTRQQPSARRAAAGAASSGHSRRALTMRAPEPVPLPGADVAARKYQSMDILPSQADLEAEDGGAFADAEGMESSCDDDARADDAVAGRGGDGGGCSSSSSSARWWTPAGAHGRRRQDRPRRQRAGQPQRWQEQQQPQPHEAQTGHAGAGPGPVAEARDRSSTDRDPMGRSNPSPGAGAGGRALAGGLAGSATAAAAAAAAGGMAGTSSFKSRSIAGGLPVGGLSASLALKASNSGRLSAAGAAPAAAAGLRVSGATRGAVNSSEPGGMLDGGVGGVIPGPSGGADVFRAARNPLYDLEHLDADMEPELEAAGTGTGLGRGPSGVMNLDAALWAFTEDGEARASNSGATGLVRMQPSHSAAAAAGRLGAGGGAGSNASSSHPMLETLGSAGPGSSQHMGLPPLAPAPSRGGGGGTDASAKYANPLFREGSMVSTSFTAAARAAAMAAARNVASMRTTAPLEPGGGIDAAAVAAAGGQDPGAAAAAAEQRLASGPALTWKGPSVSGEAAAAAAANGSGTAGPRGLAKVFSLKRSGTGARGQADAGSGSGSSAAAAVAAGAAVAAAAAASAGGGAGQEASMSVVRPNSVGAAPGAVAAAAAAAASSPQSQRRATSATSGLSFVQQQQQQRGGAASQRLHHQHLGGIAGSSGTGSASQLPGASATPRALAAAYGSAGGGRVGSVTGRYASVTGGAAAFGVLGSGNSLTGGGVPSTPGGGHVPKAAMAAYDVGLLNAGVGEVDMALVQRKLRALFWFRRPQILIWISHVNFLQNSLSLTLCIYYLFSYNTGNSILQVSSRLLYVWLPLLGANLLFMVYMGWVVVPLYTLVSTTCVRNPRALQAHIRRHKKAEAEEEGGITGFVLGLLTRCFMRSHHHTTRMAAKHGGSETTALNNLFMANLANQAGVIMAADAQLTNKKLGAAEAVYREYIDIWRTKARIAAGLEAAPEPGGFRLQADVTEFRSAFNALDADGSSTVTTDELFTHLHVLGTRATKTELKSMISQIDNDGDKRVDFDEFVVFMVFSVFDDNGNSCVEIPDIKKMCRRVRLQVTDEEVSAMMDLADPDGDRKIGLRQFFKLFKDVTIPELGPRPAHAELHGLVLPAASISAAAGSVPSRSAASRAYRNLGSPLHGSGGSVSMGPGGGGGAARSRLARATAVDPAAEGGSPPPPRRPGSGSHKGLRQGGSHNAIGSTAGSEIASGSPSVSGKGGGYSAGGLAAAGAATAAAYGVIGGPAYDGSALLPEQLSPLRRDTLPQQQQQQQRQQQPTRGAAEIVAASAFGGTPAPAPRHRIRDRALHRVAKQLTGGRAKEEVVVGWGSWAFQGGKGGSPISVRGGRAPTGRLIKLLRERYAKHVFIIDEYETKTCYNCGCQEMAIKRLGGLKEGQRPWSVKVCNDCLTTWNRDVSAANVIRVLLLLKLMGFERPTKLQRPPWPPAAAGPG

SEQ ID NO: 4539 - protein, 246 aa, Chlamydomonas reinhardtii
MSGLERLQPNRPQLAPALQAYVGGIPTAATASAARFEERLRYLFASGAAGPAAGQAAGQAEAAGPAEAGPRGAVHVLWHYHFSTFRRKRWAAFIQRDRALHRVAKQLTGGRPKEEMVVRWGSWAFQGGKGGSPISVRGGRAPTGRLIKLLRERYAKHVFIIDEYKTSKTCYNCGCQEMAIKRLGGLKEGQRPWRSVKVCNDCLTTWNRDVSAANVIRVLLLLKLMGFERPTKLQRPPWPPAAAGPG

SEQ ID NO: 4540 - protein, 918 aa, Chlamydomonas reinhardtii
MASHFEQARAAQERFDCGGPRLRPRRVLEAGGEAPLSRDCSQGTIKTTFKSIADPPGLEQLLHAQHPTAAAGKAAGQAPNPERFRGQSSIAEGFRRQRQHACGSDHPHHVTNDAAQRALRGFPDLDQHVMEDCMTAVTTSEHHQEVQHRDQRASRDPPSHKLAQYVYGHVFQVHRSEDRVGPPRSVTGLSNVVHQLARQMETNVGVHLATNFFRWLKTRCRVQLHRTLHPEAAAAAPDAGAGGGAGVELPRQQQTIVFALATAIAPDEPLCAYTDAVAALQSQPDVLQELELWVQREQDRWRPRGLLVPGCSFERLKNHSLPHGESYLAWAAEVLHEIEQHRSQLRARGVPKAKLARHFPVFGLLPEPSYQQVHIGLGQEAVKELLVHRDHFASEHHLIPPAAVPTGSWEEDKEAGKQARVSEEELLRLSLRGVDPGCSPTYWTCAMRWPWLPAWVVALLGVDLVLRLPEVRNGSCPVRWPDDLTKDQQAAAEAQLAAHLTASKAAAARDTLMTRTQAADRATAAASTAAARWAKEVQAAAQQGRAELVPPRPLALVVAQSAEHRKAAAVAAADAAAREAADTANDVAREATMSALVQGLRRHVEVLAAAHCAMLQLHRCLQQQQQQQQLAARVWDIADAQRISLLTERCLYATYSLMLEARAATAKQRHKRRAFTHCSGAEHRTNCGYAQHQRWQQWRLKADTALCAWQSSLPTARTVDVENVLGRLDYKYGGSTGAGGQGEAVVQPPVRELGFVDLLALYAAPAWRQKRLQVYCQKQRVLCREAVRLMGGEPEVTQQKGVVGWGGGSAGYHGTVSRAGQPPRKEFVRLLRERFARHVIVINEYRTSMVCANCGRLSLRRKELPQGGADFHVLVCNDCHTTWDRDENAALNMRLLLVLQLLGRDRPAVFCRQEGGVD

SEQ ID NO: 4541 - protein, 377 aa, Chlamydomonas reinhardtii
MKATQIIGVDPCGGGNWFMAARSPLYQPGPWAWEGVREGVSPAQRFLLELHDKQLDEELFPGQLPPEPRRRRKGGGRKGGHRRKQSKHWQPRARTARRRRQKRGRFHMSMGHWRHMSGLERLQPNRPQLAPALQAYVGGIPTAATASAARFEERLRYLFASGAAGQAAGQEAGQAAGQAAGQAAGQAAGQAAGQAAGQAAGQAEAAGPAEAEPRGAVHVLWHYHFSAFRRKRWAAFIQRDRALHRVAKQLTGGRPKEEVVVGWGSWAFQGGKGGSPISVRGGRAPTGRLIKLLRERYAKHVFIFDEYKTSKTCYNCGCQEMAIKRLGGLKEGQRPXTATSPPPSNVIRVLLPLKLMGFERPTKLQRPPWPPAAAGPG

SEQ ID NO: 4542 - protein, 210 aa, Chlamydomonas reinhardtii
MAVVLGVLCRSAVAGRGVCWGRRALRTELRSGAPSRVRGKPLWHYHFSAFRRKRWAAFIQRDRALHRVAKQLTGGRPKEEVVVGWGSWAFQGGQGGSPISVRGGRAPTGRLIKLLRERYAKHVFIIDEYKTSKTCYNCGCQEMAIKRLGGLKEGQRPWSVKVCNDCLTTWNRDVSAANVIRVLLLLKLMGFERPTKLQRPPWPPPAAGPG

SEQ ID NO: 4543 - protein, 227 aa, Chlamydomonas reinhardtii
MAPKRRRDEAEKAEEEKGGGAMTRQRPSAHHSPGQAAGQAAGQAAGQAEAGPRGAVHVLWHYHFSAFRRKRWAAFIQRDRALHRVAKQLTGGRPKEEVVVGWGSWAFQGGKGGSPISVRGGRAPTGRLIKLLRERYAKHVFIIDEYKTSKTCYNCGCQEMAIKRLGGLKEGQRPWSVKVCNDCLTTWNRDVSAANVIRVLLLLKLMGFERPIKLQRPPWPPAAAGPG

SEQ ID NO: 4544 - protein, 337 aa, Chlamydomonas reinhardtii
MRHHQVVYVPVTSSAGGGIAAAADGREPPADAVPPGLSSESRAATLAVSADVVVAFWRPAAPASARLWPGSSLFQQHPTLLLGALPELPEMSFRTEPLPRPLHPGPVQAAAHVRQQMEFELAALAAEVEAATREVRVEWSELLAAGQAAGQVEAAGPAEAGPRGAVHVLWHYHFSAFRRKRWAAFIQRDRALHRVAKQLTGGRPKEEVVVGWGSWAFQGGKGGSPISVRGGRAPTGRLIKLLRERYAKHVFIIDEYKTSKTCYNCGCQEMAIKRLGGLKEGQRPWSVKVCNDCLTTWNRDVSAANVIRVLLLLKLMGFERPTKLQRPPWPPAVAGPG

SEQ ID NO: 4545 - protein, 1370 aa, Cyanidioschyzon merolae
MKGICPGFDVRKTEFSGETQETYWKNIFDIKRLKVSKKKKFTGMIETDGLAICVHYRRFKTDRHVPSSALPETKHEDEKEEDPAMQNVQKNDFFVGADPGNTNIVTIASEIRSRMGNHECEEENRDLECRSERAPGSYERSDEPRSRLESFSGVHGSSRCALGGAVGGGVYKAPVGSFANEFVFWETACIREFFFNELSALKEDESQRLLVAYGAGRWKIQKETMPAPTTRTFKECARRFVTIPVDEFRMSYTHHELGCTLQNVEMEKCQRSPEEDIAKYGPLAEEQMERRAKARGLLALVSTTNDGKKRMEFVNRDLNAAINIRGWAVMEHKPPDRTRVNFIGQSLQVELYEKKLKPVVVGRSKKLGGVCTSLGDFLSRAGFSPLLYHWQQRLSFERRLLLEGDSGFCERQPAVGIMVRHTPRRGSGVGTAAPAVASTSRAKHGPVAATAVPQQASTPPCDVSGEDHASQPGASAETLEVPSDFGCDDLRPAASATRDSGKHLEPDAERFGSLEQVRQEAEAGTELTRSALGPRQVRKRVVQRRSATGAAERAPVSTHPPSDAAPRSGTSVGGTNTGQSGQDAWHPAGASGPDAPETPAAFITSAAVPESTGADLRWTPAPSSEHLTRGAVVMRSPQVDGPATAVIKRCPNCGGDDLEFGSSSGQTACMLCGHVVEENTVVNELQFVEGAGGHSAVVGQFVRTGSSGAASLGAAAAATAAGASLLYNASTAGVTRLTIGHRESRELTYAAGRRRIATIASQLHLPPRFVDAAHRLFTLAVQHNFVQGRRTQTVAAAALYIVCRREKTPHLLIDFSDTLRINVYVLGHTYLKLCRVLHLALPIIDPSFYIHRFASRLDLGEKQNAVAQTALRLISRMKRDWIHTGRRPAGLCGAALLIAARMHGFRRSQREIGAVVRVGDMTIRQRLCEIEETPTGTLTGRELAAESGLIESVAEEDTTEAPLAATADTSANAVSPEAVDTLDGCDPPAFRRRHALSSSSSLEWLEQQHHVLEQSKAAEQDIVADTSLTEQERAFLEASATAEGERVPVTVLVAPATSHGAVSNYVGSVRREASGPLAPLGAAADERAANPVTTGVIAGTSGLSTRSGPEGGANYRWLSDRVEELSDLDSEEEAMFVCTPEETAFREKIWTAMNQEWIEREAEIARWERDDPERYQRLMRKREYMRGFYKSNASNSAAAEAPWSHSATATAAAAAVATTTTAAAAAAAAAAAAAAPGGERPSTVAPAAVEAVVRSVRDAVRSAVTHSKRTSKKINYDALEQYDLGGRGDSIPTNDAETVAVADAAGRPSQPAPSLFDFGDQPAPERRPPVAQSSIPAPTRVAKRVVRQQQHHQQQQQRAASATPQPTHQT

SEQ ID NO: 4546 - protein, 338 aa, Cyanidioschyzon merolae
MVDATKHQGKKEADPATQEVQDKDIVVGADPGNTNIITIAAPKRAEDGMDGNLRQKDMRLLRFSRARYYRESVVVNARMIIVTWNAGIKHHLEALSEATSRGAVHEAFRKFMEFRVAHWDALWEEYRKPRWARLRMNLYGVKQRAFANFFNQLSAFEGDDRQRLVEAYGAGRWKNRKGTTPAPATKLYKECARRLVTIPVYEFRTSYTYQELGCTLQRVEMEKCQKSAEEIAKVRTAGGGANGKEGESSRVTRIDFHAAINIRRCAVLEKRPPEWTQEDFIGQPLKVELYEKKLEAVVGGSSRKAGGVCTSVGDDLSKARVRCGRVTSLIQTVFAKST

SEQ ID NO: 4547 - protein, 200 aa, Cyanidioschyzon merolae
MEVRVAHWDALWEEYTKPRWARLRINLYCGKQRAFANFFNQLSAPKEDEGQRLVVAYGAGRWKTQKGTTPAPTTRTYKQCPRRFATIPVDEFRTSYTHHELGCTPQREEMEKCQRSPEELAKYGPLTVEQMERSAKVRGLLALMRTTPNGYNRMEFANRNLNALINVKTSAVLERRPSEWTRENFVRQSLKVELYEKQLE

SEQ ID NO: 4548 - protein, 1856 aa, Cyanidioschyzon merolae
MEVHIAHCDALWEEYTRNRWIRLRMILYCGKQRAFANFFNQLSALKEDESQRLVVAYGVGQWKTQTGCTSVPSTRTCNECARRFVAIPVDEFRTSYTHHELGCTLLRVEIEKCQRSPEDVEKYGPLTEGQMERRAKVHGLLALVSTGSDGKKRMELVDRDFNAATNIRNCAVLERRPPELTQENFVGQPLKVELYEKQLEAVVGRASRNYCTRATSFHFRTAVVAAWLLSAKGTISGFATEMASDLTAEVVSALAVLHWGKSTGESRRQAHTFLCNVSKFFSADTIFALGRDLIAANLCYESLTRSAVPDADSNFARVVETAAVQYGFQLLVDLIERSQAEALSARTDTLDMCQTLCAFAVELWNHCHGTLAAGKRAFSCGERRKVAQFLARIVVQYWESSYGSRVLDHLLGSPLESAESMEIFSTIIEEILSAVAEETGIRQSAGAATVQLTADAIGERLVQEGSRIVLVALHMLRCEFTDPGPAFRASLQLLLKLLEGFPVELLLEADVPTSLVLFLRRRFEQMFGDRLVACADYDWLAIEALGCWITRAQPMLPKQRDVLGSLLETLISFVICFDEAYTGDVGLLIDAPIRWEERLSLLQAVIELTFLAFESTLTHLQERPAIWSSFILLLGRLVSHPWASIAELALAFCCRDQVLKTVLTAQCVVVLLDAAWMRCCMDTSLPAYLFTGKDIVENSVLDANDPRWRLMSFVLSRNAEQPKLNSSLRSRTRDFLRKICQNWRDACLDWVVTRAVDRMDCHRNRRSTGPVMEQFCFREEPAHLHSFWRGLLSVRNGQYPSDAESALFIEMLLDETREVMFFTMSEVLAPLLPSLGRGSGVSKPPGVSKTSSRGASSEVGGEENARLTQVLQLGERVEFVLSMVDTLDLDQDANKIHMILHVFFGCAPLLARIEGAQIRTIQAALRVLERIQQLPCTEHARWSAMGLHRREKWFDALCRGILALLLRSEGSETVSGAQVLLPSIQQALREAPMPFPARCSLLKCVPVIVCSLDSPEKSIPVLNALLEETLGIWKTMALQHEVLRDPERFLIAFLAPSADADTNRTCLLQLLTLFEQMLSVSMKHSIWKQTVMFGELLPTTLPQMVAALNHLFSLRPDGRGDISVLAPSRIEIAQWYRLVMEWMLRAGLLPEAIADSRQHRKELLKTRRSFIHISARGLLLFQRMLALDPDPDALKFYREICLRGIPQVDIEYLALIVRHVMKTLLQCEAQAHQGSDIWETDVTEIWLPLLRATAERIGQLAYEEVSDEESSTMDEVLHGAPHANEASSANEAFDQAAVALVELAVAMLKLESCSRRVQLFNWARDFLRKCLDWHFESASRKAFAFLRKHLSFWIHPAEGYLAIDTESLLQLENSIARALTDERWYSRPEDVRKVHAAVNDELYRRGFSPACFTTSELPSKHPNASMFPGENGGERMRALGNVAVRRSFNHGASTQLNEAAMAFPSSKMASQKHRPLSVRLLQSWKKRTQLYTMDLEDESINGDDDTALEGVAVLFGGHPAPQCAHPACDGKIERAADARVRPSLPRLWSVPRQLGATHTGNSRRQRRRLEAGAVIRGRCVVTRDFFDRLAPVGGTCVALGRGKQRNNGQGAVETGAMPTSQSSSVAALGGTQGFARKEPATGSQSAVQRVVEAVAERVEAILDGELREQERGASFGASATTTETDPELEALRERRLEALKRAAAARSRWCALGHGRLHELDDEEALLEACRSSERVVGVFWRLRTAPETQPLQDALAHALRSLAQQHLETRFWVAEAERFPSMCERLGVQVLPSILLIRNQQVVRTFAGLGEWVIAGRAGVRFSLERLAKTLRRHRITGVSLHPDAESRDAPSDSD

SEQ ID NO: 4549 - protein, 679 aa, Cyanidioschyzon merolae
MLSPHPTLLRASGTRARTQGGDEADVVPMCNIKSHFVSIDSGVLYGIMRQICPESNVSREEFSASQSEQAKGIHGNDRDRWSRHVCTLSAVEDRSSVPSSTSPSAKHGEKKEADPATLEVEDNDFVVGVNPGNTNIATITAPKRAEDGTDGNLRQKDMRLLRFSRARYYRESGIMNATKKIETRNAGMRDILEAMSEVTSRGAEFQAFREFMEVRVAHWDALWEEYTKTRWARLCMNVHCGKQRAFANFFNHLSAHKEDESQRLLVAFRAERWKTQKWTTPAPTTRTFKECAWRFVPIPVNEFRISYTHHELGCTLQRVELETCQRSNEDIKKYEALTEALMKRRAKVRGLLALVSATNDGKKRMELVNRVFNAAINIRKCAVLENRPPEWTRENHTGQPLKVERYEKTLEAVVGGRSKKTERRLHDGVRWCSLMFGSSRRATVRKSLSIIEEDEDEAVSECDSPAELRHRITDGPRKFDAVGVTGHGVESDESSAGNETMPSRAHKVPLGPVEQSRLGTSARSRRQEQRGQNTDQIREFQVRLQETQDALRKTQAEVSMLRAHVSALEMALEERNTEVRRLREQLASSAPGASGTLNVQQGKVASAVGRDLLGLLRSSHASAADSPISISTVSEGALKPSLPSRLVELRANTSPTASSSASNILLGTPDTGKSSMGKR

SEQ ID NO: 4550 - protein, 290 aa, Cyanidioschyzon merolae
MVGAAKHVENKKAGPRTQKVQDNDFVVGADPGNTNIITIAAPKRAEDGIDGNLRQKDMRLLGFSRARYYRELGMMNARKKIETWNSGMKDHLGALSEVTSRGADFEAFRKFMEIRVAHWDALWEEDTKPRWARLRMNLYGGKQRAFANFFNQLVALKEDESQRLVVAYGAGRWAPKKENTSSPTTRVYKECARRFVTISVDEFRTSYTHHELGCRLQRVEMEKCQWSPEEIAKYGPLTDEQMERMAKVRGLLALVSTTNDGKKRMEFVNRDFNAAINIRRCAVLEKRPPE

SEQ ID NO: 4551 - protein, 413 aa, Cyanidioschyzon merolae
MGKRFNVVPMSNIKSHFVTIDSAVFYGIMKEISLEFSVSREDFTGENRETYWKSIFDFKRLRVSKQRVFTGLIETDGVSLCIDYRRLKKDRPVPPSAAPVPKHEDEKEADLETQKVQDNDFVVGADPGNTNIITIAAPKRAEDGTDGNLRQKDMRLLRFSRARYYRESGTMNARKRIETGNAGRKDLLEALSEVTNRGADFEAFRKLMKVRVAHWDALWEKYTKPRWARLRMNLYGGKQRAFVNFFNQLSALKENENQRLVVANGAGQWKTQKGCTPAPTTRTYKECARRFVTIPVDEFRTSYTHHELGCTLQRVEMEKCQRSPEETAKYGPLTDEQMERRAQVRGLLALVRTINGKKHMELVNRDFTAAINIRKCAVLEERPPESTRENFVGQPLKVELYETKLEAVVHGPP

SEQ ID NO: 4552 - protein, 439 aa, Cyanidioschyzon merolae
MHRDVTHMERVEVSDEFFDKTFIRQLMLGTGGMRRENELVHALHEIFVEFPFEVNHGPETPFDSEPRTFHDTRRVCTLPGSISRWKMCDFQGITNDRKHEDEVEFGDKKAPRRSTNEASVIRAAIQEHHAVFGLANPAEKVPELKKDMERHYRLILRARETEGFPNGEALLRHPVMEHTAPFCLYRLQSRLRHHEVDQSRVQCQQGGILRKQRVFTGMIETDGVSICVDCKRLRAYRPIEPSASPMTKHEENKETDPATQEVQDDDVVVDVTRYEDEKEADCATQKRKYNDFVVGADPGNTNVTAIAVPRRAEDGPDGNFIQKDMRLLRFSRARYYRESGIKNAWKEIETWNAGMKEHLEALGEVTSRGADFQAFREFMKVRVGHWEALWKEYTKPRWSRLRMNLYVGKQCAFANFFNQLSAFKEDESQRLVVAYGAGR

SEQ ID NO: 4553 - protein, 781 aa, Cyanidioschyzon merolae
MVDATKHQGKKEADPATQEVQDKDIVVGADPGNTNIITIAAPKRAEDGMDGNLRQKDMRLLRFSRARYYRESVVVNARMIIVTWNAGIKHHLEALSEATSRGAVCEAFRKFMEFRVAHWDALWEEYRKPRWARLRMNLYGVKQRAFANCFNQLSALKEDDRQKLVEAYGARHWKNRKGTTPAPATKLYKECARRLVTIPVYEFRTSYTYQELGCTLQRVEMEKCQKSAEEIAKVRTAGGGATGKEGESSRVTRIDFHAAINIRRCAVLEKRPPDWTQEDFIGQPLKVDLYEKKWKQTLVAGPKKRGGVCTSVGDPLPRARSPLLYTAGGNVCLWKDVLCWCECPPRVRFRGLYGNERPRRSLLSARRRQLPRPGGTGAVMGVKADVNEGNGHSVNSALRATGRRDFDSTLSADPTTNVGGVFEECLRSVQPLLPLPPGFRQEDYLFERFRCTYWAKPAAPPASPARPAVICIHGFGAGAFHWQKMLNIISEAGYDAYALDLLGFGDADMPPPLFTTQGDGKVGSPTFSYTFESWAQQILHFINTVVVTASDTGISQQRDVVLVANSIGCVAALQAACDMLRQSVEHPGMQGTRIRAVMCLNPSLRQLHYKKRRGLRVWTTPLALRVLGFRPVAKFFFSLVSRPATLRRLLCSAYAVDGPEADQIISTELVERIRAPSRRPGALDVFLAFTSYDRGPLAEELVESIAQMAATARKDPPAIWVLWGERDPWEPFALGRELFARNPHVDRFVALKAVGHCPHDQDPNTVWRYVSEMLESVERER

SEQ ID NO: 4554 - protein, 243 aa, Cyanidioschyzon merolae
MEFRVAHWDALWEEYRKPRWARLRMNLYGVKQRAFANCFNQLSALKEDDRQKLVEAYGAGRWKNRKGTTPAPATKLHKECARRLVTIPVYEFRTSYTYQELGCTLQRVEMEKCQKSAEEIAKVRTAGGGATGKEGESSRVTRIDFHAAINIRRCAVLEKRPPDWTQEDFVGQPLKVELYEKKWKQTLVAGPKKRGGVCTSVGDPLPRARSPLLYTAGGNVCLLRGVRCGRVTSLIQNVFAKST

SEQ ID NO: 4555 - protein, 772 aa, Cyanidioschyzon merolae
MIRTVFALYPGISRNGKWTIINGIMKDRKREDEVEFVDKKASNETTNEASAIRAVIQEHRAVLGLPNPTDKVSELSKDQERYDRLILCYFVFLDRELERKAEMKLNGKNEEWERRKAFLVGKRFDVVPLGKIKSHFVTIDSRILYGIMKEICPEFDVSREEFSGENRKTYWKNIFDFKCLKVSKQKVFTGMIKTDGVALCAHNRRLNADCSVPSSAAPVTKDEDEKEAGPTMQEVQDNDFVVGGDPRNTNIITIAAPKRADDGTDCNLRQTDMRLLRLARARYYRESGIVNARKKIGPWNAEMKDHLEALSEATSRGADFEPFRKFMDVRVAHGDALWAEYTKPRWARLRMNLYCGKQRAVANFFNRLNALKEDGSQRLLVAYGAGRWASKKGSTTAPSTRTYKECTSRFVTIPIDEFRTSYTHHELGCTLQMVEKEKCQRTPEHIAKCGPLKEEQMERRTKVRGLPALVRTSNDGRNGWKKRPPEPTRENFIGQPLKVELYEKKLEPVEGGRAPVATTVHRWRRSTFEHRVARDRESFFERNHIFRACLGAATAKRPPTAGNAGGARKLPIRWRRRSGCGCCAPNQWSYSRSATTTVAFAWDWLLAPRSVVENKGVLAALAQSNEQAIVRMVREPARQLWVEDGISLPAPFPETNMPTLPFSEGLTAAPNLRPHWEGIRSSETEDRTLILFENLSDSGVVVEVNWIDFNGQEIPFGWLEPGKSRFQPTYVGHPWIIRDSNTGEVMLLFVTQNAFGTAVVHSGHQVEYSYPL

SEQ ID NO: 4556 - protein, 1479 aa, Cyanidioschyzon merolae
MCVHYRRLKKDRPVPPSAAPVTKDEEKEEADPATQEVENNDLVVDAAKHEDEKEAGPETQKVQNNDLVVDADPGNTNIITIAVPKRAEDSTDGNLRQKDMRLLRLSRARYYRESGMKDHFEALSKVMGRGADCKAFRKFMKVRVAHWDALWEEYAKPRWVRLRVNLYCGKQRAFANFFNQLSALKEDENQRLVVAYGAGRWKTQKGTTPAPTTRTYKECAGRFVTIPVDELRTSYTHHELGCTLQWVEMEKPQRSPKAIAKYGPLTEEQMESRAKVRGLLALVSTTNDGKKRMEFVYRAFNAAINTRRYAVLETRPPVLTRENFVRQPFKVKLYEKQLEAVVGGRSKKLGRVCTLVGEVLSTAGRSPLLYTGGSVFLLKGTAQRRRLVSNNRGALHVQCRAARGAKRSADAEDLANAGDRRAGVIRCLQRAQNACIESPTGTGKSLALLCSALAWLEKEKERSEPSLLAVANHADMHSEFKPETEEPADEKQSIPKLLPESRSAADDCGVQDVDDDDDDDDFTSRPAPRVSQLKSASQRWRQQGAVAGTRHRYPLCGKQVPLNPLCSVAVHLEGTNLAVQQRHPRIFFCSRTHAQLSQVIAEMRRTPYAGKMRSTLLASRKHYCVHEDIQRAPSTLQAEACQRAVQLSFMEEAKSAADASSTVADPLAGISPCFYHHSAAVRRTACSAPQPFQMEDLVQVGRHWHGCPYFASRFLVHGDIQTEPNQDSVEGSSVPDERSHTGSASSTDGAVSARATSCTTRTRTIIEPADIIFSPYSYLVDPLIRRRMDIDITGAVLIIDEAHNIEEVCLEAASVDVSLSQVQRVLLQLDHYLGVQMPETEPTLETLMVRRPSLNGTALLRVFRHWLQALASFIETRIPLLDDIHGIPESHRPTSGPCTAAQRLHAQATVFWQDGALLHELEVGFFQNFDFEQWNWSMGQLNRFLDRWRQKQQRTVPALASGMAASTGFGTETATEEHAEQSVQARPTTGDERAETEPRFASLCGEVLHLLERFHIALQFIYGGQSSKGAAAPAEASLLHATDYRLVLRREMRQGTYGGVEFKLGLWCMNPAIAFRHLRDNARSIVLTSGTLSPMESFRSELATDFLCQTECDHIIDPEKHVRVCVVGTSSSGDRLEGSYRTSATWSYQDAIGEALAHCSAQIPDGVLCFMPCYRVLESMLQRWSSTGAIERICGAKRLFIERSSGQVITEYATETAGGYRLQRRGWRDSCFTPAREYGTDASVAALGERPSSLRAASSSILSRDRSKRKRRGAGRAYTSASAYANRDALQVYYDAVDAARTETTASAPVPAANARCRITADHKNGAIMLAVCRGKISEGLNFADQYGRAVIMVGIPYPNLTDTFVQLKMRYNDERSGAVSGAPINATSTSRLSGKQWYVLQAHRTVNQALGRCIRNPKDYASIILLDVRYRDTRTVNCMCRWIRDPLRDYIARHGQTLTLEAAVREVAEFFFQKYDAK

SEQ ID NO: 4557 - protein, 425 aa, Cyanidioschyzon merolae
MKEISPELNVSREGFSGENRVTFCKRIFDFKRLNVSKQGRRLKKDRPVPSVTKDEDKRKADPATQKVQDNFFVVGADPGNTNIITIAVPKRAEDGTDGNLRQKHIRLLRFSRARYYRESGIMNARKKIDTWNAGMKDHLEVLGEVTSRGADFEAFRKFMEIRVAHWDALWEECTKPRWARLRMNLHCGKQRAFANFFNQLSALKRNESQRLVVAYEAGRWKTQKGTTPAPTIRTYKECARRFVTIPVDEFRTSYTHHELGCTLQRVEMERCQRTPEDIAKYGPLTEEQMERMAKVRGLLALGSTINGKKRMEFVSRDFNAAINVTICAAMERRPPELKRENFTGQSLKVELYERKLEAVVAGPPSKAGRHLHIRWRLLVLGEFLATTVHCRQQRFFFWKLCVVVLALEWSSFTTPSDEAYVRYPT

SEQ ID NO: 4558 - protein, 448 aa, Cyanidioschyzon merolae
MIRAVFALYPGIARKGKWAITNGVTNDRKHEQEIEFVGEKASNESTNEASVIRAVVEEHRAVLGLLSPTDKLSESKKDKERYYRLALRYFVLLDGELERKAEMKLNEETNEEWERRKAFLMGKRFNVVPMCNIRSHFVTIDSGVLYGIMREISPEFNVSREEFSGESRETHWKKNFVDFKRLKVSKRKVFTGMIENDGVAMSVHYRRLKTDRPAPPVAKDEGTKKEDPATHEVHDNGFVVDAAKHREKKEVDRATQKVHDNGFVVGADPGNTNIITVAVPKRAEDSVDDNLRHKDMRVFKFPRARSYRDSGVRDHLEALSEVTSRGTDFEAFREFMEVRAAHWDALWKESTKPRWARLRMNLYCGKQRAFSNFFNQLSALRENESQRLVVAYGAGRWASKKGITPAPTTKTCKECARRFVTIPVDDFRTSYTHHELGCTLQRVEMEKY

SEQ ID NO: 4559 - protein, 421 aa, Cyanidioschyzon merolae
MIRAVFALYPGIARKGKWAITNGVTNDRKHEQEIEFVGEKASNESTNEASVIRAVVEEHRAALGLLSPTDKISESKKDKERYYRLALRYFVFLDGELERKAEMKLNEETNEEWERRKAFLMGKRFNVVPMCNIRSHFVTIDSGVLYGIMREISPEFHVSREEFSGENRETYWKKNFVDFKRLKVSKRKYRRLKTDRPAPPVAKDEGTKKEDPATHEVHDNGFVVDAAKHREKKEVDRATQKVHDNGFVVGADPGNTNIITVAVPKRAEDSVDDNLRHKDKRLLMLSRARYYRESGIMNARKKIVSWNSGMKDHLEASSEVTSRGADFEAFREFMEARAAHWDALWKESTKPRWARLRMNFCCGKQRAFSNFFNQLSARRENESQRLVVAYGAGRWKTQKGLCQLQRQKRARSAHGVSLRCP

SEQ ID NO: 4560 - protein, 222 aa, Cyanidioschyzon merolae
MEGRMTHWDTLWKEYTKPRWARFRMNLYCGKQRAVANFFNQLNALMDDNSQRLVVAYGAGRWNTQKGTSPAPTTRVYKECARRFVTIRVDEFRTSYTHHELGCTLQRVKMEKYQKSPEEIAKYGPLTEEQMERRAKVRGLLALVSTTSDGKKRMDFVNREFNAAINIRRLAVLEKRPPEWTRENFIGQSLKVDLYEKELESVVGDRSKKAARRLHVSWGRFV

SEQ ID NO: 4561 - protein, 597 aa, Cyanidioschyzon merolae
MYKYVTHMETVDIPDEFFDKTSFRYLMHGTAETWRENVLVHALYEKFVEFRFEGAWYRGDSHIYTYGAMKFITNLKNHLTENLECFMIRTAFALNPGISRKGIWSIINGITKDRQHEDDVEFVDKKTSKGSTNEASVTRAAIQEHRAVLRLVNPTDKISKLEKDKERYYRLFLRMGKTEGFPNGEALGRGSVVQHQVTFCDYRLQIPHDITKEISAEFNISREDFTGENQETYWKKIFGFKRLKTSKQKVFAGMIETNGVAVCVHYRRLKKDRRVPPPAAPSTKHEDENESDPATQEVEDTDLVVGADPGHIIIINIAARKRVADGTNGTLHQTDICLLRFSRARYDRESGMINARKKIETWNAGMKDHLQALSEVRSRRADFTAFRNFMEVRVAHWDALWEDYTKPRWARLRMNLYCGKQRAFANFFNQRTEQRAGRPKNGTMPAPTTRTYKECARRFAAIPADEFRTSYTHHELGFTLQRVEMETCQRSHEEIANYGPLMGEQMDKRAKVRGLLALVSATSDGKKRMVLVNRDFNAATNVKRWTVTERRPPESTRENFVRQSLKVELYEKQLEAVVGDRSEKAGRRLHVRWRRRV

SEQ ID NO: 4562 - protein, 416 aa, Cyanidioschyzon merolae
MIRSVFALYPGLSRNGKWAIINGITKDRKHEDETEIVDKKSSNESTNEASVIRAPSKEYRADLGLANPAEKMSELKKHMEKYNRLILRYFLFLDRELECKADVKLSEENNEESERRTAFLMGKRVNVVPMCNIKSHFVTTDSRVLHGIIRKISLEFNVSREEFTGENREPYWKNIFDFKRLKVSKQKVFTWMIETDGVAMDVHYRRLKADRPVPPSAAPSTSHAEKKEADPAMQEVQDNDFVVGADPGNTNIITIAAPKPGEDDTDGDLRQRDKRLLRFSTARYYRESGIMNARKKIDTWNAGMKDHLEALSEVTSRGAGLQAFRKLMEIRVAHWEALWEEYTNPRWARLRMNLYCGKQRAFADFFNQLSALKEDETQRLEVAYGAGRWKNRKKGLRQLQRQQRTKSVHGVSLRYL

SEQ ID NO: 4563 - protein, 1013 aa, Cyanidioschyzon merolae
MGGVYQAPVGSSAYESIRWEAAGVREFFNQPSALKEDQSQRLVVAYGARSWKTKKGCTPAPTTRVYKECARRFVTIPVDEFRTLYTHHELGCTLQRVEMEKCHRSPEEIAKYGPLTEEQMERRVNVRGLLALVSTTSDGKKRMEFVNRDFNAAINVRRCAVLENRLPESTRVNFVGQPLKVELYEKKLEAVVGGRSRNGGKASAHQLDTLCLGRGFPATTVHCRRRRSTFERRLEARLWRETLGGRYLLQTLCVQRHTGVGVPGAEEQSGNVSIQERRIIEFLLQFRSAPNVFPYRDQLVRQLHARKHWIQIKIEDVYAFDEELAGYIRQAPNEWIERLEQAVDRVVRRLRLPLDHEIGGVSVQVLLQSQENAFPLRELQSDQLGRLVRVQGIVISASKVRAKAQVVWLRCQHCDYRKMIRASVGFGGFQVPRQCDRVTEMRCPLDSYEVMPHESVFVDHQTVKLQELPESVPTGEVPRSLLLVLERNLIDRVAPGERVSAVGVYSTYASTRDRSSRSVAANIATRASGPDLVAAVRTPYIRVLGIDATQERRDRHPGFTPEEEEAMRSLSRLPNVYEVLAASIAPEIWGLSDPKRAVLCQLFGGSRKTLPDGMRIRGDINVLLLGDPSTAKSQLLKFAEKVAPVSVYTSGKGSSAAGLTASVIRDATHGEFHLEGGAMVLADGGIVCIDEFDKMRLADRVAIHEAMEQQTISIAKAGITTVLNSRTAVLAAANPLFGSFDDTRTVADQMEFASTILSRFDLIFLVRDVRNDERDRTIARHVLALHQRGHSLRPQGSGLDSAGDISDSGMLSLSPNGASEFTSSQMLNAVGLVPIDKLRRYVAYARRRCRPRLSAEAADLLRTAYVAVRQELRDRTADGPTPVPIAVRQLESLIRLTEALAKMRLSDLASAADAEEALRLFRVATMAAAHAGALPPGAFEGTLSGEFLIEVQAAEAAIRRRIAIGSMLALNRLVRELTQQHLSAAATQRAIQIMLGRQELEWRRQRTVLCRLR

SEQ ID NO: 4564 - protein, 313 aa, Cyanidioschyzon merolae
MCVLYPRLKRDRPGPSSANHEDVKEADRATQKVQDNDFGVGADPRNTYIIRIAAPKRSENGTDGSLRQKDMRLLRFPRTRYYRESSIMNARKKIGTWNAGMKDHLEALSEVTRRGADCGVFRKSMEVRVAHSDPLWEEYTKPRRARLRMNLYCGKQRVFVNFFNQLSALKEDKARGLVTGSNDKSVRGVRTPVCYNTCRVDMEKCQRSPEDIKKHAPRTEEQMQRRAKVRGLLASVSTINDKKRMEFVNRDFNAAINIRRCAVMETRPSESTRGNFVGQPLNVEPYETRLKAVVGARSRKTGRRLHISWRLFV

SEQ ID NO: 4565 - protein, 994 aa, Cyanidioschyzon merolae
MDMQVRDPVRQVSPAAREKQKAVSSPEEKERTRKKRQEARSQGPQERRMYDDTVVIACLFGHITDTYEEKLRDAIRNRVDSYSMSIRKASSGLMHLVMKMNENVTHMETVAVPDEFFDKTFIRNLMLGTGETRSENSGFTPSTKNIPFTGSRLTELMNHLTMNLERFMTRAVFALYPGISCNGKLAIINDITNDRKHEDEVEFVDKKESNESANEASVFRAGIQEHRAVLGLANPTNRVPELKKDKERYYRLILRYSVFLDRELERKAEVKLSEGKNEESERRKAVLMRKRFDVVPMCNSKAYFVTIVPRILHGIMKEISPEYIVSREDFTGEKPGHVLEECLRFQTAQSQQTKEADPATQEVEDNDLVVDAAEHEEYKEEDPATQKVQDNDHVVGTDPTHTNIIRIAAPKRSENGTDGSLRQKDMRLLRFPRTRYCRESGITNARNKIGTWNAGMKDHLEALSEVTSRGADCGVFRKSMEVRVAHSDPLWEEYTKPRRARLRMNLYCGQGSRARSSLRSRAMEDPKSVYTGSNDKSVRGVRTPVCYNTCRVDMEKCQRSPEDIKKHAPRTEEQMQRRAKVRGLLASVSTINDKKRMEFVNRDFNAAINIRRCAVMETRPSESTRGNFVGQPLKVELHEKKLEAVVRGRSRKTWSVCTSNGVFLSGARSPLLYAVGVVRLSNGVDGRAFVAASVRLPVQRRRRLQCCRLDTRMRSTATTSPGSDDPTEETRSKEKETGVSAWAERQHRTRINLVGVFFLLVTFAWSLPLFIIMLILYPFVLILDPYRARVYDWIAMLWMRLSMLSTGIHPRVVGTENLLPPDATVLYVCNHNSYLDIYTVAFLGRFFKFVSKRSIFAIPIIGWAMGMARQIGIERDSRRDQLRVFREMVSRLEHGVSLLLFPEGTRSKDGTLRAFKQGPFRVAKQAGVPIVPLTITGTAEVMPPWALAPLRWPKQRITLTIHPAIQTADHSVTDLIEAARTAIASALPPGLCGR

SEQ ID NO: 4566 - protein, 1190 aa, Cyanidioschyzon merolae
MVGAGNTRRENVLVHALHEKHPFYSFEGTRYKGDRDMYTYGAKKYLTNLKNHLTMDLERFMIRAVVALYPRISRNGKWTIINGIMKDRKREDEVEFVDKKASKVSTNEASAIRTVIQEHRAVLGLPNPTDKVSELSKDQERYDRLILCYFVFLDRELEGKAAVMLREETNEEWERRKDFLMGKRFNVVPLSNIKSHFGTIDSGILHGIMKEICSEFNVSREDFAGENRETYWKNIFNFKRLRVSKQNLFTLMIETDGVALCIHYRRLKRARPVPPSAAPVTKDEDKEKAGPATQEVEDNDLVVGAAKHEENKEEDPATQEVENNDFVVGADPGNTNIITIAVPQRAEYGTHSKLRQNDMRRLRFSRARYYRESGIMNARKKIEIENAGLKKHLEAMSKVTSRAADFEAFLKCMDVHVAPWEALWEEYTKPRWARLRMNPYCGKQRAFANFFNELSALKEHESQRLVVAYGAGRWKTHKGTPPAPTTRTYKENARRFVTIRIDEFRTSDTHRELECTLQRVEMEKRQGSPEDIAKYGPLPEVQMERRTKVRGLLAFVSTTNDGKKRMRFVNQDFNAAVNIRRCAAIEKRPPQQTRENFVGQPLKVQLYEKKLKPVVGGLPSKAGMRLPVSWRLLVRGAFAATTVHHWRQRFSLDRLLFSLPSSSRSKMNAEPGVPNSDHNRTRQMPGGNTTEQDALADRLLRFLDASPSPYHAVETAKLLLETAGYTELREDCSWLGRVHPGGRYYTTRNESTIVAFRVGRAFHVDAVNGGELRLVGAHTDSPCFRVKPRSRVSDANYEKVAVECYGGGLWYTWFDRDLKCAGRVIWRCASPTDPAQGTSRSTSWQCTLVHVREPILRIPSLAIHLDREVNQGFAPNRQTHLVPVAATALNRTKLPQCQERHATALTGAVIHTLQQDIMPVKEDPMSITRDAGGIVIHDFDLCLADAQPASIGGVQREFIFASRLDNLFSCFAALEALLSLDSEAGVESGAESAVCMVALFDHEECGSGSAQGAASPLVSDLIRRVLACLWTGKTDAGAFEDAVQYTIRRSFLISLDMAHAVHPNYAEKHESGHQPLLGHGPVLKVNANQRYATDGWSAHLLRAVAECCDSPIPLQEYVVRNDMPCGSTIGPIVAAGTGVRTVDVGAPSLSMHSIREMAHVRDLWYTVKLLQAFMRCFGEVRASHNTACVT

SEQ ID NO: 4567 - protein, 602 aa, Cyanidioschyzon merolae
MLPSVPSSARLGAATVMIFVFPESTPTRNRSSAPPALSGPPPGPSSASPVAKDAKHVDEKSADPAMQEVQGKDFVVGVDPWNTNIITVAAPKRAEDGTDGNLEAISHVTSRGADIEAFREVMKIHAAHDESLWKECTKPRWARLRMNLYCEKQRAFANFFNELSALKKDESERLVVANGAGRWASKKGTTPAPSTRTYKECARRFATIPVDEFRTSYTLHELGCALQRVEMEKCQQSPEDIKKYGPLTEEQMERRAKVRGLLPLVSTTSDGKKRMKFVNRDFNAPINKSRCAVLEKSPPEWTRENFVREPLKVELYEKQLEAVAFCPCVRAAPSSQVHRIGRFPSQSLGLESPAFRTCESALFFMVEVESDSVAERDRSSFLAGHDAIRLAKSCVDSPPERWYAALYQVYADLTKLRCWSNVEVVYSDSATFPTGLLGPLFEEDSMVQELHSAQCILGSERACFHVRCCIVGSPPSGRAINALSPQSETRTEERIITSRREPEVVIAVPMHAMLKLSNLDQALRMSSHIEGIVKNRHVADSSASTHSTDRQAGSRKSSVIFGFVDEDTTTAYYRIREGACESNDRREFSTDDIASCLAQERT

SEQ ID NO: 4568 - protein, 1715 aa, Cyanidioschyzon merolae
MKIHAAHDESLWKECTKPRWARLRMNLYCEKQRAFANFFNELSALKKDESERLVVANGAGRWASKKGTTPAPSTRTYKECARRFATIPVDEFRTSYTLHELGCALQRVEMEKCQQSPEDIKKYGPLTEEQMERRAKVRGLLPLVSTTSDGKKRMKFVNRDFNAPINKSRCAVLEKSPPEWTRENFVREPLKVELYEKQLEAVSRAHHSPLLYTAGDSIFLLKGVCFRGVSGLNKKRSFPFRCMSLHKSDSNQLLVSLVVEHAKRATPPPEESGILFDEKGSQISEHHAAPALEGSSATWPFVPARPREVSSGSDNACENGRALRRLHRTPSPEVTGSGSPTSHANVVGTCFVTGFVVEKDDSGTDVTGCGESRASEKTSGRPFRREVTAADSRLNLSGEHLACVSLEQLRSLPSLAALNEISLASNSLRSVDLRPLASCRSLQVLLLNDNLLERIDLTPLASCSQLERLWLHRNKLKHIDLSPLAISGSALRSLYLSRNELQEISLAPLEKCSKLRALQLEGNPNLKEIDVTPLFACRELSSFEAPPQARLIVRELAALEVQRRSYQQDCNSLANVESSESARTAAIMPSKLVLPKVFRRRGIVLHWIREALPDANLRDLTGQRSLKENSVNAELQDAERGEGIQTNASMNIIAPASEEALSSVAELQTGPTASRNLESVQEDKTPLCALIVGMTTHRRISTCRLLEQSGTLRVLQSPSAAAALDAYISAPDGIDLILMEPAEYEVFSEQAQAASIEISVPVVAVGPPEFERSGVFRRCIAIGARGFISFPLDNRDAQALTEVARSFRASRQTSASQVLKESSVSELLLPTQEVRADSTSVSRDLSPMSMTNGSDASKYGAGIEPDSKWVPSWWQNSDSIRKEGNSSPAAVSDRMDTFLSKSEGVEDIAEESSTYRFIQRAGIGHLRSGSPICRSGSESSQFACERAEWARVEAIFAHRDKRPSREPCFQLQFMQHCSNPATLLIPTDGYHSAGLERFADIAAVCRLPKTSATVLFLRVLSHQDKLANSGTSSISNALTRSASESVSSNCWLRNIHVDAFYHFYRCKLAPIRSPLERFYNVIASSWPGSDIHDSSSSLYAEGKIRRLKESRARYVSRYTITLLIQELVYRKLCVGRNASGVAVPYHAAKANQGQMRSARYSYQGKSFLSSSINQSGSASAMESAHFSSKNGEAARNAFLAFRDEVCEVLLTASVASACVWFHLGGGNRNYVPLSILRKVRFAEAIFAAERGIIVDSLMEMLTGNGIALVAQKELETVWNYNARTGTATSEQLASRDAPSFECSIPSVSGLSSSFPEQQSDGAVTQAPSGATESREQIAGAIRSSFLPDTFEFSKWCRKFCISREAAVSYFLDRGSLVPKAVEQVLNRFRGLSLVQKPASSEHSAATPQLQDEKTVPEDQNLAPFSKLGNASVGDSLSPSAFVHLFLALCDPGNEKALHIFFDIMDLDMDGFISAADVAYFYREKCEIAFREGLVLASANNLWAQLVDMCRTSANDPKLESKGITLKMLRDIGERRRSSFIRNVLFKDDGMALVDIQQTLRLTSGFDNLVLSHWNDCVLLVLDNGTQLYMKDTAYFVIALASSSLQLHALFGRLTAMHGCEHDYAVRVGVASRGVRPKIRSSAQKSLMSALSEARIGTYGAASVPKETKWKSQAFPQADTNSASVAERAIARASAPCKWMARSCERTGAGLTPMPE

SEQ ID NO: 4569 - protein, 501 aa, Cyanidioschyzon merolae
MKEHLGAMCEVTSRVADLEAFRKFVEVRVAHWDALWEEYTKPRCARPQMNLYGGRQLAFANFFNQLGAFKKDKSQRLVVAYGAVRWAPKKGTTPALTTRTYKECARRFVPIPVDKFRTSYTHHELGCTLERVEMEKCQRSPENKTKYGPLTEEEMERRAKVRGLLALVSTSSDCKKRMEFSNRDFNATINILGDVRCWRRDLQNSQDGTLLDNPAKPRYMRNSWKHYASCGHLQMAGSRASNLKQTREKRQRAVASASAAAAVRWESIDAALCEQRATAVTRSLIWAYLILAVVLVVFPALYTHAEDSGLLSSAPRLFAMAATAITLVNMLLVSTSVVFIGARVSAARDRLRRWALEQSRTRAGADDSESVAAALAALEREVIGRGDALRFPLVASLGLIALFMAIRLAGLDDEYPLAAAGPAGAPIAAIAAHQTVGDAHGAAVWTFQGYALGTRSRCAGHGARAAASLLVSAVERSRRCDPEQYFCGKPGSCGHRPIGHW

SEQ ID NO: 4570 - protein, 627 aa, Cyanidioschyzon merolae
MYRDVTDMETVEIPDEFFDKTFIRQLMLGTEETRKENERVHALHENFAEFRFEMNLERFMIRAVVALYPGISRKGIWAIINGITKDRKHEDEIECVDKQASNEGTNEDSVIRAAKQEHRAVLGLANPTDKISELKKERYYRLVLLYFVFLDRELERKAEMKLSEEINEEWERRKAVLMGKRFNVVPMSNIKSHFVTIDSRVLYGIMKEISPEFDVSREEFTSGNRQTCWKSIFDFKRLKVSKRKVFTGMIETDGVALCVHYRRLKKDRPVPPSAAPVTKDAENKEEDPATQEVEDNDIVVDVTKDEDEKVTDPATQEVQDNDHVVDAAKHEDEKEEDTATQKVQDNDFVVDVAQHEDEKEADPAVQKVQDNGFVAGADPGNTNIITIAAPRRAEDGTDGSLRQKDLRLLRFSRARYYRESGIMNARKKIPAWNAGMKDHLEALSEVTSRGADFQAFRKFMEVRIARWHALWEEYTKPLWARLRMSLYGGRQRALANFFNELSALKEDESQRLVVAYGAGRWKTQKGTTPAPTTRTYKECARRFVTIPVHEFRTSYTHHELGCTLQRVEMEKCQRGPEEIGKHGEVTEQQMERRAKVRGLLALANTTTDGKERMEFVNRDLNAAINIR

SEQ ID NO: 4571 - protein, 432 aa, Cyanidioschyzon merolae
MRLLRFPRARYYRESGVMNARKKIPAWDAGMKDHLEALSEVTGRGAHFQASRKVMEVRVPHREALREEYTKPRWARLRMSLYGGRQRVLANFFNELNALKEDESQRLVVAYGSGRWKTQKRCTPALTTRTYIECARRFVTISIDEFRTSYTHHELGCTLQSVEIEKCRSSPEGIAKYGPLTEAQMERRAKVRGLLALVSTTNDGTERMEFVNRDFNAAIKITTCAVLESRPPELPRENVIGQPPKVELFEKKLEAVAGGRSKKAGRRLHLSWRRRLGRIVRRYCTPPSFDFQTAVRAGPVAVKSPVFVAVRPPRAPWYLICICIFRVYESIINCDMSSGAQDTSSAQSALKDTEKKAGGALDSAKESVTGAFSSAKETISDKFRDLTGQKSAQEKAQDKAGDAVDHLKETGQSAKKGIEHAADATKEKFQGN

SEQ ID NO: 4572 - protein, 376 aa, Cyanidioschyzon merolae
MAVPKRAEDGINDSPFQRDMRLLRFSRARYYLELGIMNARKEIEAWNAEVKEHQEALSEVTSRGAGFQAFLKFMEVRIAHWDALWEEYTKPRWARLQMNLYVGKQRAFASFFNQLSALKEDENQRLVVAYRAGRWAPKKGTTPAPTTGAYKECARRFVAIPIDEFRSSYTLHELGCTLQRVEMEKCQRSPEEIAKYGPLTEEQMERRAKLRGLLALVSTTSDGKERMEFLNRDFNVAINLRRCAVLETRPPELTRENFVGQPPKVELYEKIWNQYVAVTMSSGSQDTSSGQSVLKDAEAKVGSAWESTKESVSEAFTSAKETISDKYRDLTGQKSAQEKAQDKASEAVDHLKETGQSAKESLQHAADAASEKLKDG

SEQ ID NO: 4573 - protein, 927 aa, Cyanidioschyzon merolae
MGLLRFRRARYYRESGVMNARKKIPAWDAGMKDHLEALSEVTGRGAHFQASRKVMEVRVPHREALREEYTKPRWARLRMSLYGGRQRVLANFFNELNALKEDESQRLVVAYGSGRWKTQKRCTPALTTRTYIECARRFVTISIDEFRTSYTHHELGCTLQSVEIEKCQSSPEGIAKYGPLTEAQMERRAKVRGLLALVSTTNDGTERMEFVNRDFNAAIKITTCAVLESRPPELPRENVIGQPPKVELFEKKLEAVAGGRSKKAGRRLHLTFAARGASVPEMEPKPTVFNSLTREKEQITLSSDRSFLSWYICGPTVYDAAHVGHARNYVSFDIVRRLLVDYFGIPVLYQMNITDVDDKIIQKSFDSGESFTNIARRFEADFFDDLEALHCLPPDVVTRVTEYIPEITAYVRKLMERGYAYEAASGSVYFDVEAFERSGRHRFGKLRPAAAAAATSVETRPHAGANGVDPPSLEQLSVQEEKRNPRDAALWKASKSAMEPGWESNGLARGRPGWHIECAVMASLVSCAGTTHLDIHTGGIDLEFPHHDNEIAEAEAYFETDLWSRYFLHSGHLNIEGLKMSKSLKNFITIREVLRRWNWRQLRVLFLMHHYQTTMNYSEESMTHAAAVERTIQEFMRSTEAELRAHLPEERHRKPTKVDLELLYQVLPATEATVRAHLSDNFNTQDALQDLLTLIRTVNLHRHETPGGVGYATLHHIRSSVGRILSCFGLDYDVKDDVASQGGAALASVEPWIQGAVRLRDQIREVVLSADANTDANALKESILAVCDEFRDAVLPPLGVRLEDRTYPKPAIWKYDDPAAIQADIEQRRQAEAARAAEKEARRREAEQRLLKELEQGRTHPSQMFLDPSLYSQWREDGIPTHDAEGRELEKSRVKRLLKEQQRQERLHRKFLEAQASGLLSKLGMEP

SEQ ID NO: 4574 - protein, 635 aa, Cyanidioschyzon merolae
MYRDVTHMETVEIPDEFFDMTFIRQLMLVTGEARRENERMHALHEKHPFYSFNGTRYKGDGDIYTYGAMKYLTNLKNHLTANLERFMIRAVVALYQSLSRNGKWAIINGITKDRKHEDEVEVVDKKASNKSTNEDSVIRAVIQEHRAVLGLVNPTEKISELKKIRKDTIASSCEKNEEWERRKAALVGKRFSVVPLCNFKSHFVTIDSRILYGIMREIIPEFDVNREEFIGENLETYWKNIFNFKRLKMSKQKVFTGLIETDGVALCVHYRRLKKDRSVPLSASPVTKDAENKAADPATQEVEDNDLVVDAVKQEDEKEAGPATQKVQGNDFVRAEDSTDGSLRQKDMRLLRFPRARYYRESGVMNARKKIPAWDAGMKDHLEALSEVTGRGAHFQASRKVMEVRVPHREALREEYTKPRRARLRMSLYGGREPKAGSSVRSRALSAQERSYASSNDEGVQGRVEMEKCQRSPEDVKKYRPLTEEQMERRAKVRMEFVNRDFNATINIRRCAVLERRPPALTRENFVRQPLKVELYEKKLEAVIGGRSNKTGRRLRVSWRRLVEGAVAATTVHARRRSTLERRCWCVSTGFADRAASATKSHPLSAAAVKAMKSSLRRGSPRSSIKQSLASFESS

SEQ ID NO: 4575 - protein, 676 aa, Cyanidioschyzon merolae
MYREVTDVKPVEIPDEFFDKTCIRHPMLCREETRREDMLVHALHETHPFYRFESTRYRGDRDIYRYGAMKYITNLKNHLTVNLERFMLHAVFALYPGISRSGKWAIINGITYDRKHEDEVEFVDKKASKGSTNEASAIRAVIQEHRAMVSSHPALFRVSGPTARTQGRGEAEMIETDGVALCVHYGRLKADRHVPPSALPSAKHEDEKEEDPATQEVEDYEFIVDADPGNTNIITITAPKRAEDVLKIETLPRILYNQCEEKIETWNAGMKDHLEALSEVTSRGADFTAFRKVMEVRVARWDALWGKYTKPRWARLQMNLYGGKQRAFANFFNKLSAMKEDESQWLVVAYGAGRWKTQKGTTPAPTTRTYKECAWRFGTMPIDEFRTSYTHHELGCTLQRVEMEKCQRSPEDIANTTNDSKKRMEFVNRDFNAAIDIRKCAVLEQRHPELTREDFVGQPLKVELYEKKMEAVGVFVTTVHGRGRSTVVLCLFRCRGAHYPLGPRQVSLSGSWRAGAHGSNIFSLAGGRMASSDPAQDCIFCKIISGELPCYKVFSDENCTAFLDLFPATSGHTLLVPRSHHEVLETMPPEEVSAVFARVPLLGKAIKAAVGAPSYNLLVNNGREAGQVVPHVHIHIIPRKPGDGLIRHPGGGPRLEPDKAEPLLRVLKEKLGRAGP

SEQ ID NO: 4576 - protein, 557 aa, Cyanidioschyzon merolae
MIRAVFALYRGLSRKGIWAIINGITNDRNYGNEVEFVDKKESNQSTNENSVIRAVIEEHRAVLGLANPTDKISELKKDRERYDRLVLRYFVFLDRELERKAEMKLSEETNEEWERRKAFLMGKRFDVVPMCKIKSHFMTIDSGVLYGIMREICPEFDVRKTEFPGENRETYWKNIFDFKRRKVSKQKVFTGLIETERVALCIHYRRLKKDRPVPPSAASVTKNEEKEEAGPAKQEHEENEDAGPATQKVQDNDFVVGADPGNTNIITIAAPKRAEDRTDGNLRQKDMRLLRFSRARYYRESGIMNARKKIETWNSGMKEHLEAVSEVTSRGADFEAFRKFMEVRVAHWDALWEEYTKPRWARLRMNLYGGRQRAFPNFFNQLSALKEDESQRLVVAYAAGRWKTQKGTTPAPTTRTFKECARRFVTIPVDEFRTSYTHHELGCTLQRVEMEKCQRSPEDTAKHGLLTEEQMERMAKVRGLLALVSTTSDGKKRMEFVNRDFNAAINIRKCAVLEKRPPELTGENFVGQPLKVELYEKKLEAVVGGRSRKAGRRLHVR

SEQ ID NO: 4577 - protein, 322 aa, Cyanidioschyzon merolae
MLETDGATICVHYRRLKKDRPVPPSAEFSAKHEENKEANPETHKLQDDDLVVGADNELVVPADPGNTNIITIVVPKHAEDGTDGNLRQKDTRVLRFSRARNYRESGIMNARKKIETWDAGMKDQMEALSELTSRRTDVEAFRKFMEVRIAHWDARGRSRIFFNKLSALKENESQRLVVAYGAGRWASRKGTTPAPTTRVYKEFARHFVTIPVFEFRTSYTHHELGCILQRVEMEKCLRSPEDIQKHVPLTEVQLERRAKVRGPLALVSTANDGKKRMECVNPDFNAAINTGKSAVLEKRSPEWTRGNFIGQPLKVALYKKKL

SEQ ID NO: 4578 - protein, 349 aa, Cyanidioschyzon merolae
MRVLRFSRARYYRESGIMNARKKIETWNSGMKEHLEAMSELTSPGADYEAFRKFMDVRVAHWDAVWEEYKKPRCARLRMNLYGGKQRALANFFIQLSALKEDQSQRLVVSYGAGRWASKKGTTPAPTTRVYKYCAWRFVMIPVDEFRTSYAHHELGCTLQRVEIEKCQRSPEEIAKYGPLTEEPMEGRAKVRGLLALVSTKNDGKKRMEFVNRDFHAAINIRRYAVLENKPPEWTRKTFVGQPLKVELYEKKFEAVGVFGRRGRKPTPGTLTATNSGAEAVAPENMDENSEQTSAPPETTLQADTLEDGWQHVRGRSRNKRLARLCVWGADTKPLKGWFAEYSQWLRGG

SEQ ID NO: 4579 - protein, 750 aa, Cyanidioschyzon merolae
MQNVQDNDFVVGADPGNTNIITIAVPKRAEDGTEGNLRQKDMRLLRFSRARYYRESGIMNARKKIETWNSGMKERLEALSEVTSRGADYEAFRRFMEVRVAHWDALWKEYTKPSWARLRMNLYGVKQRAFANFFNQLSALKEDESQRLVVAYGAGRWKTQKGTTPAPTTRTYKECARRFASIPIDEFQTSYTHHELRCTLQRAEMEKCQTNPEDMKKYGPLTEEQMERRTKVRRLFVLVSTTDDGKKRMEFVNRDFNAVINLRRCAVLEKRSPDSTRGNFVGQPIQVELYEKKLEAVVSGWSIETGRRLSTGVMLERGTLEAAKTETPASQAVVSDHSEIDRVRVTVTSRDRPGITAAITAVVARCSCEILSVRQVCVRRRLTLMFELLVKNAFPQQSIFRELLLVSKRIGVSVDFSLQPSTEISSAEACMLQHASEQYVITAIAADSITPAFLADLGQKLQERNFVLESVNKLSQHRLGCIELVVSSPASSSSSDIQQFRSEMFVLGRKYATDVAVQKESLIRKSKRLVVMDMDSTLIQQEVIDELARYAGKFEAVQEITHRAMCGELDFRTSLYKRVECLKGTPATVFQKVIDHLVYTPGAHFLAHSLKRLGYKLAVISGGFAPIAQHVRQTLGLDYAYANQLEVGPDGCFTGRTVGPIVDGQRKADLLMAIAQQEQIDLEQTICIGDGANDLPMLSMAGLGIAFNAKPAVQERAAFRLNRQSLDSVLYFLGIPESEQIQLREHNDAS

SEQ ID NO: 4580 - protein, 283 aa, Cyanidioschyzon merolae
MKEVTPVFDVHEEEFSKVTSRGADFRAFREFMEAQAAHDCEMWKWSGKPRRARQHVNLYCGKQRAFTNFFNQLSVLKVVKSQRIVISYGAGRFVPGRRSAPAPSTRANKECAYLFIPFPIDEFRTSYVHHELRCAFQRIELEKCQQSPEQIEKYCALTEVQMERRAKVRRLLALESTINGKKRTEFVNRQFHAVITIMRCAVLETRPEELTRTISVGQLLKVALYGEKLKPVVAGRSKKAGRRLHVGGRRIVYVGRFAARHHSTPVMQRTPTETQSLLCHTIL

SEQ ID NO: 4581 - protein, 996 aa, Cyanidioschyzon merolae
MEARVAHWDALWEEYTKPRWASLRMNLYCGKRRAFANVFNQLNALKEDESQRLVEAYRAGRWKTQKRTTPAPTTRTYKECAQRFVTIPIDEFRTSYTHHELGCTLQRVEMEKCQRSPEDIKKYGQLTEEQMERRAQVRGLLALVSITTNGKKRMEFVNRDFNAALNIRTCVVLQTRPPEWTRENFVGQPLKVELYEQKLEAVTGVCCVTVSGNWSTCTLMEPFGRDSGKLVWIHDLEQEDAEPVLAQRALSPHWRRLVQSSVAAGERSDERARDALLVPVTDPLRAQEASTSGDRSDGTQLVHNTASVDEATLTALQTLELRRELGQAFRSLRSAVTERGFQRVLITNEVELNADERRVCALLRNAIALREKYLYLPEVPEYANPAPPYRDCDLSIHVPPPYDPFRGPALAKGDYAFEVRDGIMEVTRPATETSREPCKFVVPGSYALFVHDLNTLIGIMNDPDSRSFCYRRLQLLSLRFQMHLLLNDEAERLEQMTVPHRDFYNVRKVDTHIHHSSCMNQKHLLRFIKKKLKTEPNTPVIERDGRVLTLAGVFDSLGITAYELSVDTLDVHADKRTVQRFDRFNNKYSPLGESRLREVFLKTDNFIEGRFLAEITREVLDDLVESKYSHIEPRISIYGKKRCEWDRLARWFTKHRIYSDHARWLIQIPRLFGAYHEAGLLESFQEMLNNIFFPLFEVTQDPSTHPELHTVLQQIVGFDTVDDESVPQPRIDLLTLPPPLAWRTSAPMPYAYFTYYIYANLWVLNRFREHRGLHTFRFRPHAGEAGEIDHLAVTFLLAHGINHGINLKKAPVLQYLYYLCQVGLAVSPLGNNLLFVDYTKSPVPVFIARGLNVSLSTDDPLMFHFSREPLMEEYSVAAQIWKLSSSDLCELARNSALQSGFEPCVKAHWLGPRWFLTNDQGNDIHKSNVPSIRVRYRYETLLNELTLVFRQASGASCTHPEPGGSLSSVVSSRVLPTFAQFYYERHMRRQGPAENR

SEQ ID NO: 4582 - protein, 515 aa, Cyanidioschyzon merolae
MKDRKREDEVEFVEKKASNESTNEASVIRAVIQEHRAVLGLVNPAEKVSELKKDKERYCLLILRYFVFLDRELERKAEMKLSEENNEEWERRKAFLMGRRFNLVPMCNIKSHFVTVDSRILYGIMKGISPEFNVSREEFSGENRETSWKSLFDFKRLKASKQKVLTGLIETDGVALCIHYRRLKRDRPVLPSAAPATKDEDKKEAAPVTQEVEDSDFLVDAAKDEDKKEAAPATQEVEHNDLVVDADPGNTNIITIALPRRVEDDTDGNLRQKDMRILSFSRARYDRESEIMNARKKTETWNAGMKEHLEALSEVTSRGADFEAFWKFMEVRMAHWDALWKEYTKPRWARLRMNLYCGKQRAFANLFNELSALKEDGSQRLVVAYGAGRWASKKGTTPAPTTRVHKECARRFVTIPVDEFRTSNTNHELGCTPQRVEMEKCQRSPEEFANYGPLTEEQMERRAKVRGLLALLSTTNDGKKRMEFVNLDFNAAINVRRCAVLESRPPEWTRENFFG

SEQ ID NO: 4583 - protein, 372 aa, Cyanidioschyzon merolae
MCVRYRRLKADRPVPPSAAPVTKHEDEKVADPAMQKVHGDDFAVGVNPGNTNIITIAVPKRAEDGTAGNLRQKDMRLLRFSRARYYRESGTRNARKKTETWNSGMKDHLEALSEVTSRGADFDAFREFSEVRAAHWEALWKEYTKPRCARLRMNLCCGRQRAFANFFSPLSALKEDESQRLVVAYGAGRWKTQNGCTPARTTRTYIECARRFVTIPVDEFRTSYTHHELGCTPQRVDMEKCQRSPEDIAKYGRLTDDQMERRAKMRRLLESVSTINDKKLMEFVNRDFNAASNIRRCAVMAKRAPELTRVNFVGQPLRAELYKGKLKPFVWGRSRRSPLLCTGYAAFDAWKAFAAAAAAAAGGGGGQGRSFG

SEQ ID NO: 4584 - protein, 790 aa, Cyanidioschyzon merolae
MQEVEDNDLVVDATKHEDNNKAAPATQKVQDIDFVVGADPGNTNIITIAAPKCAEDGTDGSLRQKDMRLLRFSRARYYRESGIMNAGKKIESWNSGMKDHLEALSEVTSQGADFEAFRESMEGPRCSLGYAVGRVHQAPVGSSAQRLVVAYGAERWASKKGTTPAPSTRTYKECARRFATIPVDEFRTSYTHHELGCTHHRVGMEKCQRSPEDIKKYGALMEGQMERRAKFRGLLALVSTLNDGKKRMEFVNRDFHAVINVRCAVMEKRPPDWTRENFVGQPTKVELYKKKLEAVVGGRSKKLGGVCTSGGDDLSKARSPPLLNTVGGRASHRRRPCELQPSIHSFLTSFISAGDYDTARAYAADKMFVPIIYTACRVAGVCARSRISSVRTRCDVFWGAPLNRFGLRRASLPGRAVLRMDTWTMASAELPEEKMEPTVNSDSTPAGGSEGVSKLDAGVAAESTPFTTAEPMSADAQEGMFSQEMRFGPDSYRRRTRREGSGPRRTPSASRRTASTMRRRPLTYKLTDLQPGQELRGTVCGVVSYGAFVDCGVFYEVDNAEDSSSSFYASSDGLAETSAQGASELNAMEQEAASADTAGALPNTWGERKKFIPFDGLVHIRDFSREYVENPESFVTRGDEVTVYVKFIDLEKRRLSLSFLPPGQQRSQGRNTSSARNLYTPTETADGRRILVYADSENRRRVGSYQLDETVEGTVRRVTNFGAFVDIGSEVDAFVHVSDLWGQNKQRTLQSIKPGDKFTAQICEINDRAKRIRVRDAEPVSNEHGTEETE

SEQ ID NO: 4585 - protein, 215 aa, Cyanidioschyzon merolae
MRLLRFSRARYHRESVVVNARMIIVTWNAGIKHHLEALSEATSRGAVYEAFRKFMEFRVAHWDALWEEYKKPRWARLRMNLYGVKQRAFANFFNQLSAFEGDDRQRLVVAYGAGRWKNRKGTTPAPATKLYKECARRLVTIPVYEFRTSYTYQELGCTLQRVEMEKCQKSAEEIAKVRTAGGGATVKEGESSRVTRIGEYSSQRHEMYGVREPRF

SEQ ID NO: 4586 - protein, 305 aa, Cyanidioschyzon merolae
MEETCPQFDGRKTEFTGESRETYWKNIFYFKRRKVSKQRVFTGIIETDGVSMCVHCRRLKADRPIVPSASPVTKHEEKKEADPATQEVHESDFVVGVDPGNTMNIAVAAPKRAEDGSDGDLRQKDMRLFKLSRARYHRESGIMNARKKIETWNAGIKDHLEVMGEVASRGADFKAFREFVKIRVAHWGALWKEYAKPRWARLRMNLYCGKQRAFANFFNQLRALKEAESQRLVVAYGAGRRKTHKGTTPAPRTRAYKECAPRFDTIPVDEFRTSYTHHELGVYASESWDGKAPAELRGYGKSTEP

SEQ ID NO: 4587 - protein, 572 aa, Cyanidioschyzon merolae
MKTSRRCLSEASVIRAAIQEHRAVLALANRAEKVPDMKRDEERCYRPIVRYFGFLNRKLERKAEMEPSQKANEEPERQKAALLGKRFYVAPLCSIKSHYVIIDSRVLYGVMEETCPQFDGRKTEFTGESRETYWKNIFYFKRRKVSKQRVFTGTIETDGVSMCAHCRRLKADRPIVPSASPLTKHEEKKEADPATQEVHESDFVVGVDPGNTMNIAVAAPKRAEDGSDGDLRQKDMRLFKLSRARYCRESGIKNARKKVETWNAGANEHLEAMSEVTSRGADFRTFLKFTKVRVADWEAPWKEYAKPRWARLRVNLYCGKQRATADFFNQALDDPESVSTSAVNKNIQGVRRRFVTIPIDEFRKSPIHDELGCTLQRMGMKKCQRSPEDIQKYGALTEEHMGRKAKVSGLGASGSTINSKKRMKFVNQDFNAAINIRRCAVIERRPPELTRENFAEEPLKVELYEKKLKPLGGRFSARHYISSTMPDDIAPRPLQIARTVVNTSTSVAVGQPASADSTPVWNGCSSVCMCMCLCSWRSHWGGAKVARVSSEMEPAVGEAGCAPRDIPRKRIA

SEQ ID NO: 4588 - protein, 513 aa, Cyanidioschyzon merolae
MWAIIDGITNDRQNVQEIEFVDKKTSRRCLNEASVIRAAIQEHRAVLALANRAEKVPDMKRDEERCYRPIVRYFGFLNRKLERKAEMEPSQKANEEPERQKAALLGKRFYVAPLCSIKSHYVIIDSRVLYGVMEETCPQFDGRKTEFTGESRETYWKNIFYFKRRKVSKQRVFTGTIETDGVSMCAHCRRLKADRPIVPSASPVTKHEDEKEADPATQNVHESDFVVGVDPGNTMNIAVAAPKRAEDGSDGDLRQKDMRLFKLSRARYCRESGIMNARKKVETWNAGANEHLEAMSEVTSRGADFRTFLKFTKVRVADWEAPWKEYAKPRWARLRVNLYCGKQRATADFFNQALDDPESVSTSAVNKNIQGVRRRFVTIPIDEFRKSPIHDELGCTLQRVEMEKCPRSPEDIQKYGALTEEHMGRKAKVSGLGASGSTINSKKRMKFVNQDFNAAINVRRCAVIERRPPELTRENFAEEPLKVELYEKKLKPLFCLGRVRRHYCKPLATAFDF

SEQ ID NO: 4589 - protein, 854 aa, Cyanidioschyzon merolae
MCVLYRRLKRDRPGPSSILSLVKHEDKKDADPATQEVEDNDFVIGADPGNTNIIAVAVPKRAENGIDGKLRQKDMRLLRFSRARYYRESGIMNARKIETWTAGLRDHLEAMREITSRGADFQAFRKFMEVLVAHWGALWEEYTKPRWARLRMNLYCGKQRAFANFFNQLSALKEDERQRLSVAYGAGRWKTQKGTAPAPTTRTYKECARRFVTIPVDEFRTTFTHHVLGCTLQRVEIEKCQPSPADMKKYGAMTEEQIERKANVRGLLSCIRGCAVQEKRPPEWTRRNLVGQCFQVELYEKKLEAVVGGRSKKTRRRLHVSSRRFGSDAFTAILPHYRRRSTLRAFFVFQLTLDFLHCTYFFLAKERFTRNSGRSVDNRRTLGRRARSQNPAARTVFLPSMLMTPERSVAADNATENVVPEEIEHGERVTDLRGRIGRYRSSVPDARGKFGPFGGKFVPETLISCLEELEEAYKKVSKDPTFQQELAQQLRDFAGRPTPLYFAERLTAHFARPDGSGMQIYLKREDLLHTGAHKINNALGQVLLARRMGRTRIIAETGAGQHGVATATVCARFGLPCVVYMGARDMERQKLNVFRMRLLGAEVRPVHTGTATLKDALSDAIRDWVTNPSTTHYVVGSVAGPHPYPAMVRDFHYVIGEEVYQQVQERHGPGRLPDILVACVGGGSNAIGLFRRFVDEPSVRFIGVEAAGRGLDTHEHAATLTKGSVGVLHGSMSYLLQDDDGQIVEAHSISAGLDYPGVGPEHAFMRDTGRAEYLSVTDEEALDAFQLVSGLEGILPALETSHAFAALKRINDTIPAGARPIVVVNCSGRGDKDVNTVITALKERNSPLVSGLDI

SEQ ID NO: 4590 - protein, 350 aa, Cyanidioschyzon merolae
MKKRRRAGPVTEKVQDNDFVGGADPGNTNITTIAAPKRAEDGADGNLRQKDMRLMRFSRARYYRESGIMNARKKIETWNSGMKDHLEALGEMTSRGADFEAFRKFMEVRVAHWDALWEEYTKPRWARLRMNLYCGKQQAFANFFNQLSALKEDKTQRLVVAYAAGRWKIQKGCTPAPTTRLYKECTRRFVTIPVDEFRTSYTHHELGCTLQRVEMEKCQRSPEDIAKYGLLTEEQMERRAKVRGLFALVSATSDGKKRMEFVNRDSNAAINIRRCAVLEERPPDWTSANFAGQSLKVELYEKKGSSSGGRSKKTRTSAHWLMTTSLGRASRHYCTAGVVRISNGVRIDKS

SEQ ID NO: 4591 - protein, 591 aa, Cyanidioschyzon merolae
MEVRVAHWDALWKEYTMPRWARLRMSLYGERQRAFANVFNQMSALKEDKKSQRLVVAYGAGRWKTQKGTTPAPTTSAYKECARRFVTIPVGEFRTSYTHHELGCLLQRVEVGMCMRSPEDKKIRTADGGADGKDGESSRIACIGEYQQWRETRCAVMEKKPPQLSRENFKGQPLKVGLYEKKLEAVSKAEHSPLLYTTGGHNVFLLGDVCCWCRRCVWNRFPEKTAVRLRPAADAPEACRFTQETTGITSYAKLRVLDRFRSRDGLETLVLSARGPLDRRTVEQAAATWCAPGGVLPPRLDPQNEVLILQCKPDADAFEGTAPNEQLHLAAWTMLRLRPESQENRRPNNVERSVSQSLLLSWIIHHTRVGIRNFFIYLNEPDACGSRIMELRDELTERLADVPANVSIIAWPFRPPKGVHWNHVQIAAMNDCLWRNRGIFKWILFADVDEYIVPSENALRSNPESPVLHVLDDIERQLPINLCSVRVPCWWRYDVIEPALNWSEASQTSLRRPWLGAAAPVDRVCKPHLNREKCFVRTDQVYYTAVHAVAEAYGPNCVQVWPDVHQHLRLEHRRSPRAFDDYSPAEVLYAT

SEQ ID NO: 4592 - protein, 522 aa, Cyanidioschyzon merolae
MHLASEVYREVTHMETVEIPDEFFDKTFIRHLMLGTEEARRENELVHALHENMPFIASRYLTNLKNQPIVNLELFMIHAVLALYSGISRKGKWAIISGIKNDRKSTNEASIIRAARQEHRTVLGLANPTEKISELKKDKERYYRLILRYVVFLDRELERKAEMKLSVETNEEWERREAVLMGEISPEFNVSREEFSGEARETYWKNIFAFKRLKVSKQKVFTGLIETDGVALNVHYQRLKKDRPVPPSAAPVQDNDLVFDAVKDEEKKEADPATQKVQHNYFVVGADAGNTNIITIAAPKCAEDGTDGSLRREDMRLLRFSIARYYRESGIMNARKKIESWNSGMKDHLEALSEVTSRGADFDAFRKFMEVRIAHWDALWEEYTERRWARLRMNLYNGKQRAFANFFDELSALKEDESQRLVLAYGAGRWKTHKGTTPAPKTRVNKERARRFVTVPVDEFQTTYIRHELGCTLQRVEMGKCQRSPEEIAKNGALTEEQMERMEKVRGPLALVSTANDGKKRI

SEQ ID NO: 4593 - protein, 445 aa, Cyanidioschyzon merolae
MKYLMGLKNHMIVSLSRFVIRDAFALYPGLSRKGIWAIINGITNDGQNEDEIEFVDKKTSSRRKNEDPAIRAVIQGHRAVLGPANPAEKISELIKDEERYHRLILRYFAFLDRELERKAEMKLTLHRRFAVQHQVIICDYRLRTPLRTDHPFPPPVSPVTKEEEKKEADPAMQKVQDNDFLVGAHPGNTNIITIAVPRRAEDGTDGNLLQKDMRFLRFSRARFYRESGIMNATKKIETWNAGMKDHVEALSEVTSRGADFTAFLKFMEVRVAHWDALPEKYTKPRWARLRMNLYCGKQRAFANFFNQLSALKEDESQRLVVAYGAVRWKTQRGCTPVPTTRSYKECARRFVTIPIDEFRTSYTHHELGCTLQRVEMEKCQRSPEDIKKYGPLTEELMERRAKVRGLLALVSTTINGKNRFEFVNRDSNAAINIWKCAVMDPKPTE

SEQ ID NO: 4594 - protein, 259 aa, Cyanidioschyzon merolae
MCVHDRRLKKDRPVPPSAAPITKDEEKEQADPVTQEVQDNDFVVCADPGNTNIITIAAPKRAEDGTDGNLRQKDMRLLRFSRARYYRESGIMNARKRIAAWNSGMKDHLEALSEVTSRGADFEAFRKFMEVRIAHWDALWEEYTKPRWARLRMNLYGGKQRAFANFFNELSALKEDESQRPVVAYGAGRWKTQKGTTPAPKTRVYKECARRFVTLPVDEFRTSHTHHELDCTLQRVEMEKCQRSTEEIPKYGALTEEQM

SEQ ID NO: 4595 - protein, 1589 aa, Cyanidioschyzon merolae
MSECMPSTRITPNTAAAVLDTEVTRVGLRLRGNEVPHEPEEADDHERQTLHGTRRLCAVPGSRSEREMSHDQWRRERERRNEASVIRAAIRKHLAVLGLANSQEKISNMEKYGKGSYTLILHYLVFLDRDLERKTGKDVGAGKNEESEKRKAALLGKHFNVLPLCNIKSRVVTIDSRILYGIMKEICPEFDDKRNVLTGMIERDGVAIYVHNRRLETDRTGPSSISPMTKHEEKKQVYPTTQEVHENDIVDGADPGNTNIITIAVPKLAEDGMQEHLEAMNQMTSRGADFQACQEFMEVRVAHWDALWNEYAKPRWARLRMNLYCGKPRAFANFFNELSAFKEDESQRLVVACGTGRWMTQKGCPPAPTTRAYKECARRLVTIPVDEFRTSYTHHELGCTLQSVQIEKCQRSPVDISKYGALTKQSPEGMAKDRGLITSDSTTNDGKKRMEFVNRDFNVAINIRRCAVMERRPPELTRANFVGEPLQVEFYGNKLKPVVDGRSKKDREASAHQLETYDLGRAARHYCILIFKLSTIESLSRRSRTAREQQGNGTHIPDGNKSTSTPSEEVRTGAAADAREDTAFPSAEGQRPADSRRKRVKSCNISMKDYEDPHQIAKFEAISAQLNAEPPEQLGFRPGDSVDVSPRALSLLTGNLLQFQERVLGRNSVEPPEIRGFMTKLPNRLFHDYSAHGSLRTILECCFRFRVARGIRRFDLHKPDMTGVFLEMLQEVERELIKRKQLQMPRLFFAPALGSAEIDRLSAIARKHGASVVSSPREATHIVYPDPPGTTEAETEAEDYCVSLKRKGNQVLTHWWYFPDSYDSWIPAQEVEDPDGELHGEEENLSGVIEGKIWHVQKRFLEDCEKFNEWCNENDYEVIPEEEKLNVDEWKPPSASRIDGHLRGSESKTAAPTPSKRKSAEPSPVKPEPDGTPERVTVRAVREESAEPMKIKVRLAPPIASQDAGSSSNAPAEQVPAPNIAGPITFTTETGAAVDAEQPSAAAGAAPRISRPAVRPLVPDDATLRMRNVTASSRDEQLQKRLAQQREALRERRKERNDAAAAEEDALPGPAAHAPRDRESLAPRRVAEALGGLAERETLPAAAAATAIGEKSPIRVPAHSRWFRIDAIHDIERRALPEFFSGKFASKTPEVYMLYRNFMIDTWRQDPTRYLTGTAVRRHLAGDVGAVMRVHAFLEQWGLINYGVAPETRPQTVSGGFSGSGATLISTSSGSLAASSAGLEGGLPRIFLFDDGSRIPKSRMHLAPMATRRELYAAAAAIEYQCDVCGRDCSQRRYHCLLKADMDLCPECYHQGKFPEDFNGKDFIELRPVLSLGSAASATGTLTAPSTDDWTDVEVLQLLEGIEAYGDDWDAVAQHVGTRSRDACITKFIRLPIEDPFLEDDLSRLAVPAVAGETAQTERNEPPLFADAGNPLMAHIAFLANSVSPDVAAAAARAALAAIMKSDAPPEALADANAIQAVAATALGAAATRAAELAAIEHLELHRATEQAIETQVRKLEEKMKVLEQLEEEFLREREQVEIYRKELFAERLNLVARREALSSTATLGASPATALNASIPEWTVARDTRKQC

SEQ ID NO: 4596 - protein, 251 aa, Cyanidioschyzon merolae
MQKVHDDDFVVGADPGNTNIITIAIPKLAEDGTDGNVRQKDMRLLRFSRARCYRESGIMNARKKIETWNSGMKDHLEAMSEVTSRGADFEVFRKFMEVRVAHWDALWEEYTKPRWARLRMNLHGGRQRAFANFFNQLSALKEDENQRLVVAYGAGRWKTQKGTTPAPTTRTYKECARRFVTIPVDEFRTSYTHHELGRTLQGVEMEKCQRSPEDIKKYGPLTEEQMERRAKVRGLLALISTTNDGKKRMEL

SEQ ID NO: 4597 - protein, 920 aa, Cyanidioschyzon merolae
MKRAVFAPYPGISCNGKWAIIHGITNDRKYEDEIEFVDKKASKESTKEASAIRAVLQEHRARLGLANPTGKVSELKKDKERYYRLILRYFVLLDRELEREAEMKLSEETNEEWERRKAFLTGKRVNVVPLGNIKSHFVTIDSAVLHGIMREISPEFDVSREEFSGENRETYWMSIFDFKRPKVSKKKVFTGSIETDGVALCVHYRRLKKVRPTPPSAAPVMKDEENKEEVPVTQEEQDDDLVVGVTKDEENKEEDPVTQEEQDNDFVVGVTKDEDEKEASPATQEVENNDFMVDATKHEEKKEADPATHKVQDNDFVVGADPGNTSIINIAAPKRAEDGTDGNLRQKDMRLLRFSRARYYRESGIINARKKIETWNSGMKEHLEASSEVTSRGADFEAFRKFTEVRVAHWEAPWEEYTKPRWARWRMNLYCGKQRAFANFFNQLSALKENQSERLVVTYGAGRWMTQKGTTPAPTTRTYKECARRFVTIPVDEFRTSYTHHELYGPLTEEQMERRAKFRGLLALVSTTSDGTKRMEFVNRDFHAAVNIRRCTVLEKRPPEWTRENFVGQPLKVELYEKKLEAIIGGRSRKAGTHLHLDDTHDLLNMGDAGSGSKESDSALRRGGDVSGGKAAPVNGAVAASESDNASSSSAALRNSSASFREGPPGRPPLLSQRFTVARQHLPGQLHEILMWRNKYRSGLAFALGNLFFYFTTFGELSIITVFSMIVFWIVLLASPVPGASPVGTTAPTRRLLNRETAERLTESTMKTVNGLENLLRDAAHCRDWQLTVKVLLGSYLIGKLGPLFLNMYMGWLIFLSVMTLPKVYEWKQRDIDDLIREIQPVLQSKLYEAEALIKNHISSVLSQIPPKVHEYSEMLRAQLRALTGASDRARSSSSRPPFSAGTSAATSSSMTTSAETKED

SEQ ID NO: 4598 - protein, 218 aa, Cyanidioschyzon merolae
MQKVQDNDFVVGADPGNTNIITIAAPKRAENGTDGNLRQKDMRLLRLSGARHYRESCIMNARKKIESWNSGMKDHLGALSEVTSRGADFEAFRKFMEVRVAHWNAPWEEYTKPRWAHLRMNLCCGKQRAFANFFNQLSAANRDEERLEMEKCQTSPEDIQKYGALTEEQMEGRAKVRWLLALVSTTSDGTKHMEFVNRDFNAAINIRKCAVLETRPPE

SEQ ID NO: 4599 - protein, 1287 aa, Cyanidioschyzon merolae
MAQEKCSTSDERVHALHEKHPFYRFEGTLNKVDWDIYTFGAKKYLTNVKNHFTMNLERFMICAVFALYPGISRNGKWAIINGIMKDRKHEDEIKFVEKKVSNESMNEDSVIRAVIKEHRAILGLANPTDKISELKKDRERYDRLVLRYFVFLDRELERKAEMKLSEETKEEWERRKAVLMRKRFNVVPMCKIKSHFVTIDSGVLYGIMRDICPEFDVSREDFTGGNRETYWMSSFDFKRLKVSTKKVFTGLIETDGVATCVLCRRLKKDRPVPPSAAPVTKHEEKKEADAVMQEVQDNDLVVDVMKDEDGKEADPVVQEVQANDFVVGAAMHKDEKEGDPAAQKVHDNDFVVGADLGNTNIITIAVPKRLEDGTDGGMRQKDMRLLKFSRAIYYRESGIMNARKKIETWNPGMKEHLEALSKVTSRGADFEAVRKFMEVRMAHWDALWEEYTKPRWARLRMNLYGGRQRAFANFLNELSALKEEESQRLVVADGAGRWVPKKGTTPAPTTRMYKECARRFVTIPVDEFRTSYTHHEQGLTLQRVEMEKCQRSPEDIAKYRQLTEEQMERRAKVRGLLALVSTTPNGTKRMDFVNRDFITAINIRRCAVLENRPPEMTRENFVGQPLKVLLYETQLEAVVGGRSKKPRKRLHVSRRLVVQGAPVATTVHRRRRSTLERRSAVCAMRDTSWPQRLQSVTWRTVRQRFRVWLSTACSRSSTGGGGAFAEHPHDVGTGGSVNGSVTTNRDLDSASTEAGATDQIVASGLASVLGVGERTYQEEVFALCGGGRARVRRQHAQGKLTARERLYLLLDRGSFQELDRLVSSRESLHASSSDPLGKHRTPGDGVVSGFGRIHGRPVFVYSQDFTVAGGSLSEANAAKICKVIDKAIEVGAPVVALCDSGGARIQEGVRSLAGYAEVFKRNVLASGYIPQLSLILGPCAGGAVYSPALTDFVLMSRRHARMFVTGPSVTNAALGEQTTDEALGGAAVHCRISGVAHLDADDDIAVIQLARELLSYLPQNARVPAPQVVVTEDPSDREEPVLDRLVPSDAHTPYDMRDVLMRLVDDEEFLEIQTDFAPNMLTAFARLNGRSVALIANQPLCIAGAIDSDAAVKAARFVRFADAFGIPIVTLVDVPGFLPGTQQEHGGIIRHGSKLLYAYTEATVPKLTIILRKAYGGAYCVMASKHLRGDLNATWPCAHIAVMGRAAASQILRRRVASTDALETSGDTEASEESSVSVALQRGYVDAVVRPRLTRRWLIHGLSLLASKETAALREPWPPKKHGNIPL

SEQ ID NO: 4600 - protein, 1310 aa, Cyanidioschyzon merolae
MNQMTSRGADFQACQEFMEVRVAHWDALWNEYAKPRWARLRMNLYCGKPRAFANFFNELSAFKEDESQRLVVACGAGRWMTQKGCPPAPTTRAYKECTRRLVTIPVDEFRTSYTHHELGCILQSVQIEKCQRSPVDISKYGALTKQSPEGRAKDRGLIALVSTTNDGKKRMEFVNRDFNVAINIRRCAVMERRPPELTRANFVGEPLQAEFYGNKLKPVVDGRSKKDREASAHQLETYDLGRAARHYCILIFKLSTFESLSRRSRTAREQQGNGTHIPDGNKSTSTPSEEVRTGAAADAREDTAFPSAEGQRPADSRRKRVKSCNISMKDYEDPHQIAKFEAISAQLNAESPEQLGFRPGDSVDVSPRALSLLTGNLLQFQERVLGRNSVEPPEIRGFMTKLPNRLFHDYSAHGSLRTIIECCFRFRVARGIRRFDLHKPDMTGVFLEMLQEVERELIKRKQLQMPRLFFAPALGSAEIDRLSAIARKHGASVVSSPREATHIVYPDPPGTTEAETEAEDYCVSLKRKGNQVLTHWWYFPDSYDSWIPAQEVEDPDGELHGEEENLSGVIEGKIWHVQKRFLEDCEKFNEWCNENDYEVIPEEEKLNVDEWKPPSASRIDGHLRGSESKTAAPTPSKRKSAEPSPVKPEPDGTPERVTVRAVREESAEPMKIKVRLAPPIASQDAGSSSNAPAEQVPAPNIAGPITFTTETCAAVDAEQPSAAAGAAPRISRPTVRPLVPDDATLRMRNVTASSRDEQLQKRLAQQREALRERRKERNDAAAAEEDALPGPAAHAPRDRESLAPRRVAEALGGLAERETLPAAAAATAIGEKSPIRVPAHSRWFRIDAIHDIERRALPEFFSGKFASKTPEVYMLYRNFMIDTWRQDPTRYLTGTAVRRHLAGDVGAVMRVHAFLEQWGLINYGVAPETRPQTVSGGFSGSGATLISTSSGSLAASSAGLEGGLPRIFLFDDGSRIPKSRMHLAPMATRRELYAAAAAIEYQCDVCGRDCSQRRYHCLLKADMDLCPECYHQGKFPEDFNGKDFIELRPVLSLGSAASATGTLTAPSTDDWTDVEVLQLLEGIEAYGDDWDAVAQHVGTRSRDACITKFIRLPIEDPFLEDDLSRLAVPAVAGETVQTERNEPPLFADAGNPLMAHIAFLANSVSPDVAAAAARAALAAIMKSDAPPEALADANAIQAVAATALGAAATRAAELAAIEHLELHRATEQAIETQVRKLEEKMNVLEQLEEEFLREREQVEIYRKELFAERLNLVARREALSSTATLGASPATALNASIPEWTVARDTRKQC

SEQ ID NO: 4601 - protein, 620 aa, Cyanidioschyzon merolae
MGKRFNAVPLYNIKSHFVTIGSGVLYGIMKEISPEFNVSREDFTGENRKTYWKNIFNFKRLRVSEQKLFTGMIETDGVALCVHYRRLKKDRSVPPSAAPVTKDEENKEEDPAMQEVEDNDFVVDEAKHEEKKEAGPATQKVHEDDFVFGADPGNTNFIAVAVPKRAEDGTDGNLRQKDMRLLRFSRARYYRESGMMNERKKFEKWNPGVKDHLEAMSEASSRGANFKAFREFMEVRVAHWDALWKEKRAFANFFNELSALKEDDSQRLVVAFGAGRWAPKKGTMPAPAKRPYKEYARCFVTIPIDVFRKSYTHHKLGCTLQRAEMEKCQRNPEEIKKYGPLTEEQMERRAKVRERLALVSRTDGKKRMEFVNRDFNAAFSIRRCAVMEKRPPGPTKGNFVEQSLKVEVYEKKLESLAFCGVMATKSFGVSGTKLLMGFVQLHRGAGQLETAWGRFRNFSAACSRQQHIVHHHGTFSPRARGLRLYSAISSQTPSGNSHPDFQPQRKQQPSDADWADVMERIERDVMSSKVVLYMKGEPEAPLCGFSYKAVSILKAMGVPFQSYNVLADPLLREAIKKYSQWPTIPQLFVDGEFIGGSDIMESMYRSGELKQILGVYGKAT

SEQ ID NO: 4602 - protein, 417 aa, Cyanidioschyzon merolae
MQEHRAERYYRLVPRHVVFLDRELERKAEVKLGEENNEEWEKRNAVLMAKRFNVVPMCKIKSHFMTIDFGVLYGIMKEISPEFNVSREELSGENRDTYSKKNIFYFKRLKVSKQKVFAGLIEIDGVVMCVHYRRLTKDRPVPPSAAPSTKHEENEQADPATEKVRGTDFDVGTDPGNANIISIAEPKRAVRKMVLTNSGMKEHLEALSEVTSRGADFEAFLKFVEVRVAHWDALWKEYTKPSWARLRMNLYGGRQRAIANFFNQLSALKENESQKLVVAYGAGRWKTQKGCMPAPTTRVNKECARRFITIPVDEFRTSYTHHELGCTFQRVELEKCQWSPEEIAKYGLLTEEQRERRAKVQGLLALVSTTSDGKKRMEFVNRDFNAALHIRRCAVLEENPQSRQEGILMENLSSRTI

SEQ ID NO: 4603 - protein, 373 aa, Cyanidioschyzon merolae
MGRRVNVVPMCNIKSHFVSIDSRTLHGIMREISPEFDATMEEFSGEARETYGKKSIFYFKRLKVSKQKVFAGMVETDGVAMCVHYWRLKMDRPIVPFASPSAKHEEIKEADPATQEVQDNDFVVGADPANTNSITIVAPKRAEDGIDGSLRESDMRLLRFSRTRYYRESGAPESFERADDPMSRLSSFSEIHGSSRCSLGGALERISKAHVGSIANFSALKEDQSQKLVVACRAGRWAPKKGTTPAPTTRIYKDCARRFARIPVHKFRTSYTIHELGCTLQRAEREKCQRSPEDIKTYGALTEEQMERWAIVRGLLALESTTSNGKKRMEFVNRDVYGAININKCAVMERRPHNGQERTLLDNLPMLNYMRHD

SEQ ID NO: 4604 - protein, 499 aa, Cyanidioschyzon merolae
MHLAREMYRDVTQMETVEIPDDFFDKTFLRQLMLGTGESRRETQLGHALHENFAEFHFEGNRYRGDWRIYKYRAMKYLTNLKNYLTTNLERFVIRAVVALYPGLSRKRIWAIIDGITKDRKHEDEVEFVDKKASKVRTNEASLIRAAIQEHRAVLGLVTPTDKISELKKDKERYYRLVLRRKNEEWERRKAVLMGKRFNGVPVCNLKSHFQGGVLRRKPGDPLEEYLRFQTSESEQANDPGNTNIITIAAPKRAELGIDGNLRQKDMRLLGFSRARYYRESGMMNARKKIETWNSGMKDHLEALSEVMSRGADFRAFREFMEVRVTHWDALWEEYTKLRWARLRKNLYGGKQRAFANFFSQLSALKEDESQRLVVAYGAGRWAPKKGTAPAPTTRSYKECAWRFVTIPVDEFRTSYTHHELGCTLQRVEIEKCQRSPEEIAKYGPLTEEQMGRKAKVRGLHALGSTTHNGKKRMEFLNRDFNVAMNIRRCAVLETRPPA

SEQ ID NO: 4605 - protein, 604 aa, Cyanidioschyzon merolae
MKDFSPEFNVSRKESTGENRETYWKNMFDFTRLKVGKQKVFTGVIETDGVAMCIHYRRLKADRPVPSSIVSVTKHEDEKEADCATQKVQDNNFVVGADPGITNIVTIAAPKRAEDGNDGNTRQKGMRLLRFSRARYHRGSGVMNARKKIITWNSGMKEHLEALSEVTSRGADFNAFREIMEVRVAHWDSLWEEYTKPRRARLLMNLYCGKRLAFANFFSQLSALKEDESQRLVVAYRAGRWASKKGTTPTPTTRTYKECARRFATIPVDEFRTSYTNHELGCTPQTVEMEKCQRSPEDIQKYGPLTEEHMGRRAKVRGLLALMSTTNDSKKRMEFVNHDLNAAINIKRCAVLEKRPPNWTRMNFIGQPLKVKLYEKKLEAVSGARRSPLLYHWRQRFSFERRWFPGARATATPLVRLLGMTADAAWPALVVSFLLGLFAGRRSKHQRTGASGLDTSASGAPAGSVIDSTPADAPFASLVPLASAPSGTTADVKLMLIVRRDLKMSPGKIAAQCGHASVGAFRGCTDRALLAAWDRNGQPKIALRCSSLKELLAIERAARQLRIPTFAVRDAGRTQVVAGTITVLAVGPAESAKLQRITGHLKLL

SEQ ID NO: 4606 - protein, 552 aa, Cyanidioschyzon merolae
MIEPDGVAMCVHYRRLKADRSVPPSASSVRKDEDKKTADPATQKVQDNHVIVYAAKHEEKKEAEPATQKVRDSDFVVGADPGNTNIITIVAPKREEDGTDGNLRQKDVHLLRFSRAIYYRESDIVNARKKIETWNAGMKDRLETLSEVTSRGADFKALREFIEFRVAHWDALWDEYTKSRWARLRMNLYCGKRRAFANSFNQLSALKEDDRQGLVVAYGARRWKTQKGCTPAPTTRAYKECARRFVTIPIDEFRTSYTHHELGCTLQRVAMEKCQRSPEEIAKYGQLAEEQMERRAKVRGLLPLVSTINGTKRMEFVNRDLNAAINVRRCAVLEKRPPESTTMNFIGQPLKVDLYEKKLEAVVGRVSLLYCKRSASFYFRTAFGERFDAIMDAVGLWLLLGGGVFVLGALRLMGNHVENPAVQPPPRHHERPAPRAFTGEELAQYNGTKGQPIYVAVQPRPGARAEVFDVSDARSFYGPGGPYFVFAGKNASRGLAKMSTEPGEVCGAIDDLTEHEKETLYQWFEKFLQKYEVVGHLREDPSGSGSSTNCTA

SEQ ID NO: 4607 - protein, 1386 aa, Cyanidioschyzon merolae
MIRSIFAFFPGLSRKRTWAIIDVSMNDRRNEEEIEIVGKKTPRKRKNEASVIRATIHEHRAVLGLVNPTEKVTDTKKTLSPHPALFRPPEPRARTQARYGAACGRKSRVGGTEGFPTWEALRRRSVVQHKVMFHEYRFQRPLRSLQVKTGKLIGEIDSIQAFQHEQEKGTHGAIETDVLAMRVHYQRLTADCPVPSSASPSAKHKKKKAGPGTYNPPENNFVVGVGPENKDIMSIAVSKCGEDGIDGNLCQKDMHLLKLSRAKYYRDSGVFNARKLIEIWNSGVKEHLEAISNVTLRGVYFRVFPEFMETQAAHYEELRKEYTKPRWARQRMNLYRLKQHALADFLNLLTALKEDKSQRLLLAHGAGNWASKKGSIRALSARADMDVRARWAGVYTSEGRYGQKPAERFGDRKPAAMLERVGESRLQRRHQYQEMCGAGEETPGADAIQLCRAAYQGRSVQVAEDDSSGPVKIGRKAPARWYEFIQHGREKVFVSLSVCESCVALLTGAWLLSCKVARFRSTASYGVGRRLLKGGLFAASGPGSCRGVEAVAPDRTGTSGDHERLLWEALERDVSEAETVGKLPQPLRTELLSKIREFVEEVAQRQSVHDLKSADFALKDEALAPDSQWQLVEPNEPSDAVRSTQPRRASSFGPAADCLTQSPRDRLASQPGGADFNQNGQERLAGINTSGVDSPEKRSVCPPTAVHRRSTVSVHAEEWTWSDDSAYDPVDGANEYRPEQQLNSDTPNPIRGSAKDPSERDIKAQESAHHATEDREILSELSEVEHANDDRTLDTRDAYGRMQQRLRPASRTQMRMDVPGNDTQRAREDARIGPEQPVSQASMRPGKRYRRRTGNGTRVGIATPEPEQPPASRALPERLAKDAHDSATDEEVFRLARMYYAQFRGMLSLALREVSECNAERWNRRERLTSRLRSTLEGAIALLGEAGTERLVTTNDMNDLLSCLAGLRFLDELEEVLELMESRNIPRDNRTYTLVLDALCKAKRIDTAIDIFENYVVRGAAQDGAPCGGRHQRASRVHPTLVMYNILIGGCARTLRLDKAFEFFERLQSPPDNFSPDTHTYCALLDACARCSNTELALHVFEEIERKGEQIDSAVYGALLAAVARSGDRRLAFAVRGLMRRRGLAPTTAVFANLMELCAADGDYLSGFALLREMRAWGRDPTHPIYVNLMNACGRSGQPEYAMAVLDLMKSNGVAPSESAYCALIDAWARIKRLDRAFGVWRDMRAGGFEPRLRTASALLSACRRCKNLQVAHWLYQALRAELARERRTAETSEDGTNSLASQQVQIFRTMMELACDVGDYRHAVLIYLTDAAQSGLLESKHARLALRSSLRRLRQAVFRCSASGDDMETLRNAFRNLVDARAAQI

SEQ ID NO: 4608 - protein, 688 aa, Cyanidioschyzon merolae
MVRAVFALYPDISRNGKWAMINGITSDRKHEDEVEFVDKKAPNENTNEASVIRAVIQEHRAERYYRLILRYFVFLDRELERKAETKLSEGKNEEWERRKAALMGKRFDVVPVCKIKSHFVTIDSGVLYGIMRDISPEFSVSRENFTGENRETYLKNISNFKRLRVNKQKLFTGMIETDGVALCVHYRRLKKDRPVPPSAAPVTKGAEKKEADPETQEVEDNDFVVEVTKDEDEKEADPATQKVQDNDLVVDAAKDEDEKEADPETQEVEDNDFVVCADPGNTNIITIAAPKRAEDGTDGNVRQKDMRVLRISRARYYRESGIMNARKKIATWNAGMKDHLEALSEVTSRRADFQAFRKFMEVCIVHWDALWEEYTKARWARLRMNLYCGKQRGFANLFNNLSALKEDENQRLVVAYGAGRWKTQKGTTPAPTTRTYRECARRFVTIPVDEFRTSYAHHELGCTLQRVEMEKCQRSAEEIAKYGPLTEAQTERSAKVRGLLALVSITPDGKKRMEFVNRDFNAAINLRKCAASAHQSETICLRRVRRHYCTPPTSFDSRKAFSRGDKSAVPVASNGQTHTESGHLRQVRYEVWSVTAKNREEDGNHPARQVHVSVLREGCSEAEGSRRMGVQALSEADSWWRLGPEHHRSGNSAHDDSSSARDRGAVRLFGEGQRALGGVLDESRRGCV

SEQ ID NO: 4609 - protein, 499 aa, Cyanidioschyzon merolae
MQEVEDNDFVVGADPGNTNIITIAAPKRAEDGADGKLRQKDMRLLRFSTAGYYRESGTMNARKKIETWNSGMKDHLEAMSEVTSRGANFGAFREFMAIRVANWDALWEEYTNSRWACFRMNFYCGKERAFANFSNELSALKEDKTRRLVVAYGAGCWKTRNGTTPAPTTRVYKECARRLVTIPVDEFQTSYTHHELGVMSTREFEGLSNSDVWGSSGPKVTPTGVKALYIANIGRAPQRDIEKLVEPYGKVQRIEMKSNYCFVYFSEDTAVEAYEHAIAALNGQRLGSQSRILTAEWARGTAPASISRLQESEKTLGGEDSITGGDGACLENSVTTSKTLFVVNFDPDEITSRDLLIHFHRFGPIERIERRKHFAFIEFRSLDDAIRARSEMDGAYIGCRQVSVEFSQKGPPAPNGDPATESGSCTLVRNTTRTPWRQGLDTRRPRSLDRSTRNPSWARRRRRSYSPPLFPAMSSRRQARMRNSSMEAPLPETSALYRS

SEQ ID NO: 4610 - protein, 242 aa, Cyanidioschyzon merolae
MCAHDRRLKADRHIVPSASPVTKHEDVKQADPATQEVQDTGFGGGADPGMTNIITIAAPKRAGDGADGNLRQIEMRLLRFSRPRYYRESGSMNARKKIETWNAGVKDQLEAMSEVTIRHADFQDLPEFMDTQAAHVEELRKEYRKQRCARQRLNLYRENQRAYANDFNPLSALKEDERTTPAPTTRTLKERTRRFVTIPIEGRDGNVPAEPRGYKKVQTADGGANGKEGKSSRTPCIREYNQ

SEQ ID NO: 4611 - protein, 242 aa, Cyanidioschyzon merolae
MCVHDRRLKADRHIVPSASPVTKHEDEKQADPATQEVQDTGFGGGADPAITKIITIAAPKRAGDGADGNLRQIDMRLLRFSRPRYYRESGTMNARKKIETWNAGVKDQLEAMSKVTIRHADFQDLPEFMDTQAAHVEELRKEYRKQRCARQRLNLYRENQRAYANDFNPLSALKEDERTTPAPTTRTLKECTRRFVTIPIEGRDGNVPAEPRGYKKVQTADGGANGKEGKSSRTPCIREYNQ

SEQ ID NO: 4612 - protein, 260 aa, Cyanidioschyzon merolae
MQKVQDNDFVLGADPGNTNIITIAAPKRAEDGADGNFRQKDMRLLRFSRARYYRESGIVNARKKIVTWNSGMKDHLEAMSEVTSRGADLDAFRKFMEVRVAHWDALWEEYTKPRWARLRMNLYGGMQHEFRTSYTHHELGCTLQRVEMEKCQRSPKDTKKYGALPEGQMERRAKVRGLLASVSTTSDGTKRMEFVNRDFNAAINIRRCAALETRPPALTRVNFVGQPLKVELYEKKLEAVVGGRSKKTGRRLHSNWRRFV

SEQ ID NO: 4613 - protein, 239 aa, Cyanidioschyzon merolae
MFAGRSSPQTKGIHWVDRNRWSSHLCTLSALRKDRPVPPSAAPVTKDEAKKEAGPATQEVEHNDLVVDADPGNTNIITIAAPKRAEDGADGNFRQKDMCLLRFSRARYCRESGIVNARKKIVTWNSGMKDHLEAMSEVTSRGADLDAFRKFMEVRVAHWDALWEEYTKPRWARLRMNLYGGMQRAFANFLNQLSDLKEDKSQRLIVAYGAGRWKTQKGRRQLQRRERRGSAHGVLKQYL

SEQ ID NO: 4614 - protein, 1709 aa, Cyanidioschyzon merolae
MNCVAEELNRSHESTCHWRKHKARPGQTRPGRGTFRLGGIVISLQCSGTLLLFCLYGARQAHLEYLAVTRQDGYLAVEGKPDRDHLRVALTYMLCLRYSRAKVQYFISMVFRPSSNDIPVVFAQKVLERQVVDPRGQVSPDAGKSGEHCRAQKHWRGPRRGKCMRTTWSLVQTPDTRRSVAIAVRECAEDGMDGNLRPKDMRLLSFSRARCYRESGIMNARTKIETWNAGMKDHVEASSDVTSRGADFQTFLKCMEVRVADWEALWKAYPKPRWARLRMRLYCGKQRAFANFFNPLNALKEDEGYTPAPTTRTYKERARRFVTIPIDAFRTSYTHHELGCTLQRVEIEKCQRGPEHLKKYGAPTEEQMERRAKVRELLALVYTTSDGKKRMEFVNRDLNAAINIRRSAVMGKRPPELTGENFVGQRLMVELYRMKMKPVVGGQSSETVRLRRFSWRRFVTSLAERYGADRKAVPLYRRALRVHVAGSFDMSAGPRYSDESGTFLLETSRLARRRRAVVEELWNHRLAWPPAQLHHVYQGTFYTSLNDLDVARSAFRESHVPLREALGTEIQMLLGFDLDSGKWCGRMPAPPPLPDSFVYKVLFESGLPWQESVLALGYIPFQYGLSGDATDRLTRFRETSWRKAPRAAPAGAPEQSRGRSLKNSSLVDTTQPVIVPLRLSAVLLEQAVTFLMTSVSGASLEDPDTIVVRERTSAVLCGDVQVASQDESTPSSIPTLKPHHEFSDRVQQQTHRAEPATDMAVGENRSRRTTPACVRRMNVCTGEAHATAPSRITSPTRPDRYQAAFGHRAKTGRLAASSHASAADAAASASTNTAPAGTGQCEQNDLAQRERHFLIGRHIARLPSMLARCLLIRLIATNQLTLPLLCLFQGLELPILSLRSCRMHITDTWMPLIGTFVGLEELDLSFCHRITDQGIRFLARRYGSEENTEEPSVASRTLRSLSLQGCNQLTNTAVLHLEAFPRLKRLDVSDCPNMGNAALQVLAERFRLRALSVARCERVGSSSIAALLRGENHNRMASSKSVQLDQKAPIEEVPLETNECQLEFLDVSGCPAVGEYAFLGSATRFSNRIAANAASPSTGLPLRTLRLRGCTRVNDTVCEQIGHLFRNLQELDLYGCARVTDRGILDLVRSLEESLQVLCLAETQITDKGLAALAQLRCLRRLHLTRCRRLEFAPGVMEMFCTRMAAQASLSELRLRSLPSVNARVIAELSGLFVAGELKHLNLTDCHQVNDEALLALGEALRVRLMDATPRTSSRTGNSSAVATQRPPRCLVQSLSLRNTGIRDTGLIFKVFIGMRHLDLGECPTLEKLDTLFGDIAEAEEALARFGRRSMRLERPAVPTANRTSAPAFSAYEGIVSGTCSRACRDSHDDVADWRGRTNTNTEDAGCWAPWGLANARASQEAGLSHGPSALPVVPPWLNTLEYLDLSHCQSVSFANLRTLRSESLRILILDHCSGVTNACVALLAYHVPNLQELSLRFTAVGDLGIAAFANRFRHLEKLHLRGLPDVTHVGIRRLAASPLATKLRVLELAECPAIGELALASLNGMKALEYLSLKGCTEINDAALRQLEDVPVLTVLNLRQCPLVSSKQIELLRSRLPSLVEVKFSNESRGLAEHTGTPSALVDSFLAYVHGGSRRSPTGRNQALARQQQVDEAAPSPTRIFLDMFDAWEMGQRSARRRCSRSSSSANR

SEQ ID NO: 4615 - protein, 718 aa, Cyanidioschyzon merolae
MNCVAEELNRSHESTCHWRKHKARPGQTRPGRGTFRLGGIVISLLCSGTLLLFCLYGARQAHLEYLAVTRQDGYLAVEGKPDRDHLRVALTYKLCLRYSRAKVQCFISMVFRPSSNDIPVVFAQKVLERQVDDPRGQVSPDAGKSGEHCRAQKHWRGVRRGKCMRTTWSLVQTPETRRSGTIAVRECAEDGVDGNLRPKDMRLLSFSRARCYRESGIMNARTKIETWNAGMKDHVEASSDVTSRGADFQTFLKCMEVRVADWEALWKAYPKPRWARLRMRLYCGKQRAFANFFNPLNALKEDEGYTPAPTTRTYKERARRFVTIPIDAFRTSYTHHELGCTLQRVEIEKCQRGPEHLKKYGAPTEEQMERRAKVRELLALVYTTSDGKKRMEFVNRDLNAAINIRRSAVMGKRPPELTGENFVGQRLMVELYRMKMKPVSHVLGILRSYLLRPLTTRGRSHWHAVPSRALVAVAERPAGPGGVQKRTERVVPSEAARQERTARLRRAVDLPQNRIYPFLEHKVAGEAKRKDLLAVLEQDSSRFEDERAIRDWVESQIQEAIRQGAFERLPRGPLQLPQPPLGVDLVTYTMHGLLQRHGLRPVWIECMHEVDAEVKRIRLALERAYRARVATAEDTSPASTAQRAERWEAAARELQEQMHQVNRRNDAFNLMKPERLDTVFRLRMRWEHEFMRVKQRVESEYSAEPRSSLAPEATDPKA

SEQ ID NO: 4616 - protein, 495 aa, Cyanidioschyzon merolae
MNGITKDRKHQDEVEFAGEKGSNESTNEASVIRAVLQAHRAILGMANPTDKISELKKDKERYYRLFLRYFVFLDRELERKAEMRLNRENLEWEERKAVLKEKRFNVVPMSNIKSHFVTIDSRIPHGIMKEISPEFDVSREEFSGENREMSWKNIFSSKRLRVSKQKLSTGLIETDGVALCVHYRRLKRDRPVPPSANHEEKEEADPATQEVENNDLVVDAAKDEENEKEDPAMQQVQDNVHVVEVTKDEDEKEADPETRKVQDNDFVIGADPGNTNIITIAAPKRAEDGPDGMNEHLEALSEVMSRGADFKAFRKFMEVRVAHWDALWEEYTKPRWARLRMNLYCGKQRAFANFFNQLSALKEDESQRLVVAYGAGRWKTQKGTAPAPTTRTYKECARRFVTIPIDEFRTSHSHHERGRTLQRVEMEKCQRSPEDAKKYGPLTEEQMERRAKLRGLLALVSTTNDGKKRMEFANRDFNAAINIRRCAVLETRPPE

SEQ ID NO: 4617 - protein, 815 aa, Cyanidioschyzon merolae
MIRAVFALYPGISRKGKWAIINGITNDRKHEDEVEFVDKKASNENTNAASVIRAAIKEHRAVSGLTNPTEKDRELERKAEMKQSEEKNEEWERRKAFLMGKRFNVVPICNIKSHFVTVDSGVLYGIMKEIGPEFNVSREEFSNEARETYWKSIFDFKRLKVSKQKVFTGMIETDGMAMCVHYRRLKKDRPVPPSAAPVTKDEEKEEAGPATRQVEDNDLVVGSVKHEDEKEADPATQKVQDNDIVVGTAPGNTNIITISVPKRAEDGTDGNLCQKDMRLLRFSRARYYRESGIMNAREKIGTWNAGMKDHLEALSEMTSRGADFQAFREFMEVRVARWDALWKEYTKPRWARLRMNLFGGRQRASANFFNQLSALKEDKTQRLVVAYGAGRWKTQKETMPAPTTRTYKECARRFVTIPSVEMEKCQRSAEDIATYGPLTEELMERRAKVRGLLALVSTTSDGKKRMEFVQRDFNATMNIRRVDLYEKKLEPAVGGRSKKTGRRVCTSVGDAFARARSPPLLYTGGDGMQPRRRYRGHATINEERHRAAQFATAASGYVEEREAALREQCVVFQGKLQAFAREHRREIESDGALRTRFLELCMNLGVEPFLSRRSVWSQLLGLSEWYARLGFLVAQIALATRDWNGGVIRLTVLRRALQRRLDVDCGTQEPSEKRARIVSNDDIARAVRTLERLRAGFRIISIDEGKKECCLVSGAAGEISFTEDEKAVLQRARATGGSICRQDLPWENIRWGRSIERLLQLGILWVDDGASDGQRRYWALGLIPESIEDQNPVSESGPSDRYEGRPITSVASKLP

SEQ ID NO: 4618 - protein, 332 aa, Cyanidioschyzon merolae
MVHLRKPRDAPEEYLRLQTSQTRKEKPSMGTIESDGKEVDPATQKVHENDFVFGANPGGTNIITIAVPKRAEDGVDGDLRQRDMRVSRFSRAIYYRESGKMNARKKIETRNAGVKEHLDALSEVTSRGADWQAFREFMEYGTQRAFANFLNELRALKEDENQRLVLAYGAERWTSRKGCMPAPTTTTYKECARRFITIHVDEFRTSYTHHELGCTLQRVEMEKCQRSPEDIKEYGVLTEEQMEMKAKVRGLLALVSTTTNGKKRMEFVNREFNAAINKRCAVIEKRPPELTRRNFVGQPLEVGLYEKKLKPVVGGRSKKTERHLYISSRRFI

SEQ ID NO: 4619 - protein, 299 aa, Cyanidioschyzon merolae
MREISPEFDVSREEFTGENRETHWMNIFDFKRLKASKQKVFTGMIEADGVAMCVHYRRLKADPPGPFPISPVTNRAENDQADSATQEVQENEFVVGADPENATTITNAVPKRAEYGINGNFFQRDMRLLRFSRARYYRESGFTSARKRIEKWNPGTKQHLEAIRDVTSRGADFRAFREFIKTRVAHGNALWKEYTMPRRARPRLNLYCGKQRAFANFFNELSALKGDESQRLVVAYGAGRWGSKKESTPAATPRTYPECARRFVTVPIDEFRASFIHQELRCTLQRVEMQKCQRNPEVI

SEQ ID NO: 4620 - protein, 234 aa, Cyanidioschyzon merolae
MRAEDGNEEHRDVECRNERAPGNYEPGDEPRSGLEIFSEIHGGSRCSLGGAVKRIYKTPVGSSAYESVQWKQRAFANFFNELSALKEDESQRLVVAYGAGRWKTQQGTTPAPTTRMYNGCARRFATIPVDGFRTSSTHHELGCTLQRAEVEKCQRSPEAIKKYGPLTEEQMETRAKLRGLLALVRTSGDKKCMEFVNRDFHAAINIRRCAVIERRPPRVDKREFCGGASQSGII

SEQ ID NO: 4621 - protein, 311 aa, Cyanidioschyzon merolae
MSERHASVEVLESKRLKRIRYNECEEEHRDVECRNERAPGSYEPGDEPRSGLEIFSEIHGGSRCSLGGAVKRIYKTPVGSSAYESIQWKQRAFANFFNELSALKEDESQRLVVAYGAGRWKTQKGTTPAPTTRMYNGCARSFATIPVDGFRTSSTHHELGCTLQRAEVEKCQRSPEAIKKYGPLTEEQMERRAKLRGLLAWVSTTNGAKKRMESVNRASNAAINIRRCSVLDTGPAGLTRSSFAGQSLRLEVNREKLMPIAVGWSKTTVRSTVPCSWCRIPAWIRMTPDARLQPTTRGRGTSIPVAASTLQ

SEQ ID NO: 4622 - protein, 705 aa, Cyanidioschyzon merolae
MRAVIQEHRAVLGFANPAENVSELKKDKERYYRLVLRYFLFLDRELDPKAEMKLSEESNEEWERRKAVLMGKRFNMVPMCNIKSLFMTIDSRILHGIMKEISPEFSVNREEFSGENRETHWKNIFDFKRLKVSKQKKGRPVPPSANHEYEKEADPATQEVQDNDHVVDAAKHDEKKDSDPATQKVQDNDFVVGADPGSTNIITIAVPRSAEARTDGNLLQKDMRLLRFSRARYYRESRILNTTKNIETCNSGMKEHLETLSEVTSRGADFDAFRKIMEVPVAHWKPLWEEYTKPRWARLRMKLYCDEFRTSYTHHELGCTLQRVEMEKCQRNPEDIKKYGPLTEEQMKKMAKVRGLLALVRTTNGKKRIEFVNRDFNAAINVRSAVLEKRPRRSTRVNFIGQPLKVELYEKKLEAVVGAGRERLGGVCTSVADVVFTAGFSPLLYCRPQRLDCAARSICNWSACEPLHASRDTWGLVRGRRTASVRSEARTARRVSRGTRLPSARSTFQQLQMVRTESAMVELGTVMPAFALPDVTTGEIVSLDSLYADSPPPKALVVVFLAAHCPFVKHIAGELSRLSADISSGKFGPVKMVGISSNFVGTHPDDAPERMAEEIKTRRYQFPILYDETQDVARGWKAACTPDFYLLDHERKLFYRGRLDGSRPGNDIPVTGEDLRNAIQLCVNGQSPPENQLPSIGCSIKWKPS

SEQ ID NO: 4623 - protein, 450 aa, Cyanidioschyzon merolae
MYLDVTDMETVEVPGDFFDKTILRHLMLSKGEARRENELVHAFHENHSEYHFNGTRYMGYWGMFTYGAMKYLTNLKKHMIVNLERFMIGAVFALYPGASRKGIWAIINGITKDHKREDEIQFVDKKASNESTNEASVIRAVMQEHRTERYYLLILRYFVFLDRELEGKAEMKLSGTKNEDSEKRKAFLMGDALQRRSCIMKEISSEFDVSREESSGENRETYWKNIFDFKRLNTSKQKLFTGMIETDGVTMYVHYRRLKTDRPVPPSAAPVTNHEDEKEEDPVTQEVEDNGFVVGTDPGNTNHIAIAAPKRAEDGTDGNLPHKDIRLFKLSRARYYRESGIMSARKKIQTWNARVKDHLEATSEMTCRGAGYRAFREFMKVRVAHWEALWREYTKPRWAFQRMNLYCGKQRTFNILFSQLSALKECKRQRPVVAYGASRWASKTGAHAEA

SEQ ID NO: 4624 - protein, 624 aa, Cyanidioschyzon merolae
MYLDVTHMESVEIPDEVFDKTIFLYLMLCTAGTWRENVLVHALHENFAAFRFERTRYRGGADIYDHGAMKYLTNLTSRLTTNLERFVIRAAVALRPGISRKGKWATINGITKDRQHEDEVEFVEKKASNESANEASVIRATVQEHRAERYYRLVLRYFVFLDRELERKAEMKLSEETNEEWERRKAVLVGKRSGVVPLSNIKSYFVSIDSGVLYGIMREIGPKFSVSRKDFTGENRETHWKRISDSKRPKVSKQNVFTGKIETDGVAFCVHDRRLKTDRPVPPLTSPVTRDEENKEEERAIQEVEDNDLVVDVTKDEDKKTADPAMQEVEHNDLVVGAVKNEENKKAGSEKQKVQDIDFVVGTDPGSTNTITIAAPKRAEDGTYGNLRQKDIRLLTFSRARFYRESGVINATKKIETWNSGMKEHLEAMSEVTSRGADFRAFRKFMEVRVAHWDALWKEYTKPRWARLRMNLHCGRQRAFANFFNQLRALNGDQSQRLVVAYGAGRWKTQKGCIPAPTTRTYKECGRRLVTIPVDEFRTSYTHHELGCTLQTVEIDKCQRCPEEIAKYGPLTEEQMERRANVRGLPALVSTTNDGKNRMECVNRDFHAPSNIRRCAVLENRSPE

SEQ ID NO: 4625 - protein, 299 aa, Cyanidioschyzon merolae
MQEVEHNDLVVGAVKNEENKKAGSEKQKVQDIDFVVGTDPGSTNTITIAAPKRAEDGTYGNLRQKDIRLLTFSRARFYRESGVINATKKIETWNSGMKEHLEAMSEVTSRGADFRAFRKFMEVRVAHWDALWKEYTKPRWARLRMNLHCGRQRAFANFFNQLRALNGDQTQRLVVAYGAGRWKTQKGCIPAPTTRTYKECGRRLVTISVDEFRTSYTHHELGCTLQTVEMEKCQRCPEEIAKYGPLTEEQMERRANVRGLPALVSTTNDGKNRMEFVNRDFHAPSNIRRCAVLENRSPE

SEQ ID NO: 4626 - protein, 238 aa, Cyanidioschyzon merolae
MGENRETYWKNIFDFNRLKMRKKKVFTGIIESDEVSTCVYYRRLKADRLVPSSASPVTKDAENKEADPATQEVQENDTVVSADPGKTKIVSIAVPKRTEDGIDGNLRQKDMRLLRFARARYYRESGIMNARKNIEAWNAGMNEHLEAISQVTSRGANLEAFREFMKTQAAHWDALWKEYIKPRWARRRMNLYCGKQRAFTDIFHELSALKEVESHRLVVGNGAGRWASIKGCIPAPTT

SEQ ID NO: 4627 - protein, 347 aa, Cyanidioschyzon merolae
MGKRFNVVPLGNIKSHFVTIDSGVLYGIMTEISPAFDLRREEFSGETRQTRLKTDRPVPSSTKHEDGKKADPATQEVQDNDFVVRADPGNTNIISIAVSKLAEDGIDGNLRQKDMRPLRFSRARYYRESGMRNARKKIETWNSGMKEHLEALSEVTSRGADFGAFRTFMEVRIAHWDALWEEYSKPRWARLRMNLYCGKQRAFANFFNQLSALKEDESQRLVVAYGAGRWAPKKGTTPAPTTRVYKECARRFVTIPVDEFRSSYAHHELGCTLQRVEMDKCQRSPEDIIKYGPLTEEQMERMAKVRGLLALVSTNNDGKKRMEFVNRDFNAAINIRRCAVLETRPPD

SEQ ID NO: 4628 - protein, 458 aa, Cyanidioschyzon merolae
MQEHRAVSGLANPTDKISELKKDKERYDRLVLRYFVFLDRELDRKAEMKLSEEKNEEWERRKAFLMGERFNVVPLGNIKSHFVTIDSGVLYGIMTETSPEFDVRSTEITAETRETYWKNIFNFKGLKVSKKKEFTGLIESDGIPMCVHYLRLRKDRPVPPSASRSAKHEENKQADAATQKVQENDFVVGADPGNTNIISIAVSKLADDGTDGNLRQKHMRLLRFSTARDYRESGIMNARKKIKTWNAGIKDHLEAMSEVTSRGADFQAFLKFMKVRVAHWEALWEEYTKPRWARLRMNLYCGKQRAFANFFNQLNALKEDESQRLVVAYGAGRWKTQKGCTPAPTTRAHKECARRFVTIPVDEFRTSYTHHELGCTLQRVEMEKCQRSPEDIIKYGPLTEEQMERMAKVRGLLALVSTTNDGKKRMEFVNRDFDAAINIRRCAVLETRAPELTRENFV

SEQ ID NO: 4629 - protein, 602 aa, Cyanidioschyzon merolae
MSIKKASSELMHMVKEIYRDMTDIITVEVPEEFWNRNFIRHLMPGTWETSKRDELVRAFHEGRAEFRFKGTRYRGDRDIYDYGAMKYLTNLKNHLTTNLERFIIRAVFALCPGISRKGIWAIINDITNDRKHEDGVEFVDKKESNESTNEASVIRAVVQEHRAVVGLANPPEKISELKKDKERYDRLVLRYFLFLDRELERKAEMKLSEESNEEWERQKAFLVGIMKEICPEFDVSREEFTGETRPTYWKSIFDFKRLKVSRQKLFTGIIETDGVAMSVNYRLLKKDRPVPPSASPVTKDEEKEEAGPATQDVQDNDLVVGAAKDEDEEEAGPATHKVQDNDFAVGADPGNTNIITMAVPKRVEDGADGNLRQKDMRLLRFSRARHYRESGIMNARKKIETWNAGIKDHLEAMSEVTSRGAGFQAFRKFMKVRVAHWDALWEEYTKPRWARLRMNLYCGKQRAFANFFNQLSALKEDESQRLVVAYGAGRWKTQKGCTPAPTTRTYKECARRFVTIPVDEFRTSYTHHELGCTLQRVEMEKCQRSPEEIAKYAPLTEKQMERMAKGRRLLALVSTTNDSKKRMEFVNRNFNAAINIRRCVAL

SEQ ID NO: 4630 - protein, 858 aa, Cyanidioschyzon merolae
MRLLRFSRARYGRESGIMNARNKIETWNTGMKDLLEAMSKVTSRGADFHAFREFMQVRVAHWDALWEEYTKPRWARLRMNLYSGKQREFAIFFNHLSALKEDKTQRLVVAYGAGRWAPKKGTTPAPTTRMYKSCARRFLTIPVDEFRMSYTHLELVCTLQRVEMEKCQPSPEEIAKYGPLTEEQMERRAKFRGLLALVSTTPNGTNRMEFVNRDFNAALNIRKCAVLETRPPEWTRGNFFGQPLQVQLYEKKLEAAVGGRARLPPLLYTAGVVRLSNGVRMRRTLRQFSLTMTQVVKRSDAETESSLGAYERERLARMERNRMLMEKLGVTSLSNRLETITTVREQALKPIGYSKRTPKAEKRARNSENEVDRGELEPRRRSLRVRGIAPAGAGTSAEEPKNSQLQLKEEETSRGPFLEDQTFAEVALENYGATSESSMVNDDYDRSDVDDVDGNKDDGDQKSLCTRRARLFQRAWCGAMACTSLSTSEHLAKDPSRFHRWVLDEASGFFKLVPARIYSATMHPRLDAWTMMVGDKAGHVGLAVVPRERVAEHAVQVLCMRVHRDTTAGMAPRAGSANSQQLLTVSYDGSARLLDIEKQTIQTVLVDERERIFKSIALSTENDNVFWTTASHRSLGGFLVRHDLRQSQKSFDAFGISDSRVYSVSLQHQGAAGAVPGHDGLLAVTTARDGVLIFDQRRIETGATRRSTSKPLFALPHERATTAATWSPSATRLLTTCYDDLLRIWHYDGSECSLEHRFVHNNHTGRWVTPFEACWDPATDHKIFACGSMNHNPVHGVDLFHVELNKRSVWNRLTGEPMTAIAAVLAWHPAGHALIGGTASGRVYLWGEAHGSEGVLAA

SEQ ID NO: 4631 - protein, 722 aa, Cyanidioschyzon merolae
MIRAVFALRPDLSRKGIWTIIDGVTNVSKNEQETEFVNKKTSRRRKNEASVIRAVMHEHRAALGLANRAEEVLDMKKDEERRYRLILHYVMFLNREVERKAEIKLSVEKNEKWAKRKAAVLEKHFNEVPLCHIKSNFVTIDSRVLYGIMKEICPEFNQAKGIHWDNRNQWRIHMRTLSALEENKEADPATQEVHENNDFVGGADPANTNIINITVPKRAEDGTDGHLRRKGKRLLRFSRARYYRESGIMNARKKIETWNAGMKDHLESLCEVTSRRADFNAFRTFMEVRIAHWDALWEEYSKPRWARLRMSLYCGKQRAFANFFNQLSALKEDESQRLLVAYGAGRWKTQKGTTPAPTARTYKEWPVQKSLGGVCTSAGDVLSRAGFSPRLYAAGGSVFLLKGVRCRCCTFPRQASRLLRHYAGNAAYTCIGLKARGMLESELDQALVFAEALARECGELIRQAFFKDWPFRTAPVGGYHTAYDVKKRTDPVTETDRAVEELCRRRILERYGTGHRVLGEEGFDGRPESLQVKDLDPPTWAIDPIDGTANFVHHIPLCAVSIALITEGQARLGVVYNPIMEEMFVARRSRGAFLNGKPIFCSGVSELPDACIATEYGSDRSASKVAMMLEMVRSILENGTQAVRSTGSAALNMAFVACGRFDVVTEWGPYTWDLAAGQVLVEEAGGVCLLPNGAQFILDGRGILAANRYLAEKLRFQAYAFA

SEQ ID NO: 4632 - protein, 1525 aa, Cyanidioschyzon merolae
MKHEEKKEASLETQKVQDNDLVVGADPRNTNIITIAAPKRAEDGADGNFRQKDMRLLRFSRARYCRESGMMNARKKTEKWNAGMKDHLEALSEVTSRRADFEAFRKFMEVRVAHWDALWEEYTKPRRARLRMNLYGGRQRAFADFFNELSALKEDENQRLVVAYGAGRRKIQKGTTPAPTTRTSKECARCFVTIPVDEFRALHTHHELGCTLQSVEMEKCQRTPEDIKKYGALTEEQTERRAKVRGLGALVSTTTNGEKRMEFVNRDFNAAINTRKCAVLETRPPESTRENFLGQPLKVELYETTLEAVVDGRSKRTRRRLHLGWRRFVQGGFLATTVHGRHRPCDRRPQGTDTSRSAVTWRHSACSAQTDVYVCPRAGRFAWMASSSPAPGRTLFIRQVPVEFPFEPYPCQVRYMEHVIEALQTGQNALLESPTGTGKTLGLLCAALAWRSLLVAQVQGQASTQRISKSLADDSPKNDYGERLLQGVQGAAGAVVAPEASLRGLVPAASSENGPGPTPLQSVPRIIYLTRTHSQIKQAVRELSRTAYGASVRTVVLGSRQHLCVHPVVSRLENATMQNVRCTQLTKERRCSFYLNAEQKFKEVGDDFFFIAVDSTSTLALPGRRPRDLEDLAAYGHQHAMCPYFLSREASAEAEIIFMPYNYLFDGKCRRSLGLSVEGDIIIGDEAHNLESICCDSLSFDFTAAERQRCVSAIQQLASALSSGLLNRDGREGSNTEPALHASDLHALLEIMVALEERISLVSQADAKASHARPGAENGGTVCFGQRRRIEGIDGVVLPGHAIESFLQCSSKDATLTEEAYERLLRGVEAAIRALTQLRQQFPDGTAAALDHSQAPEADAIETRDQGDPYTGLLHRQVRTTQRTSAAAWAAQVHALEQLSQVLELSRLFGKPETASTFAICVHEPAKGTAGTTHQAMNPSRLKTPSAYDGVGWPRQTPSQQRPPLSGTAAAEAASGKYVHQSAREHRSSTGYTLSFWCLWPGLALRRATSNAHAVLLTSGTLSPLESVASEMGASFPVRLQNSHVVDPATQVFAGILTKGPRDIQLNSSYANRHNREYISDLGSALVNIARVSPRGMLVFFPSYVLLARFVEIWQTGAFHHNNPLNPAHRGRQPTQATVWDRLNAVKRIFMEPRDADASRQTVDAYRQWISSGRDACLFAVCRGRTGEGIDFADDFGRTVILVGLPFPSTTDPRIILKRDYLERQALHLRDHGKTITGRLWYVQQCLRAANQAMGRVIRHAQDFGAILLCDERFRAHLRDLPRWLSAASSDADPRATHNIQVFERFGTFMSNLCGFWHSERIRQLSAAQLELATSVPPVRTPVDPFQASKDEQPRLQSMAQHAAMIGRQSQEYDQAGKTGTCDARRARSLSLSSQSSKRLRETNVAATAVSSTSTAEPGLVWKAKAERRAVSAVHKDAALARGSQMISKTIMERIRARVGDRTFSLIFQQMKRYYRLALIARQPQHSVELQQIQTELQRLVNDPSDFEQLRLLLGEGAPAMRSST

SEQ ID NO: 4633 - protein, 313 aa, Cyanidioschyzon merolae
MCVHYRRLKRDRPGPPSAAPVLKDEDEKKADPATQKVHENNAFSRAEDGTGGNLRHKEMRLLRFSRAIYSRESGIMNARKKIETWNAGMKDHLEALSEVTSRGADFEAFRKFIGVRVAHWEAPWEGYTKPRWARLRMNRYGGKQRAFANFFNELSALKEDESQRLVVAYGAGRWKTRKRCTPAPTTRTYKDCTRRIVTIPVDEFRTSYTHHELGCTLQSVEMEKCQRSPEDIKKYGPLTEEQMERRAKVPGLLALVSTTSDGKKRMEFVNRDFDAAINTRKCAVLETRPPESTRMNFIGQPPKLELYEKNWKK

SEQ ID NO: 4634 - protein, 713 aa, Cyanidioschyzon merolae
MCVRYRRSKADRPGPPSISPSGKHEEKEMADPRMQEVQESDFVVGADPGATNIVTIAVPKRAENGIRGNLHQKDMRILRFSRARYYRESGIMNTRKKIETWNAGMNEHQEAMSQVTSRGADCRAFREFMEVRVAHWDALWEEYTKPRWARLRMNLYGGKQRAFTNSFNQLSALKEDESQGLVVAYGAGRWKTQKGTTPAPTTRTCKECARRFVTIPIDEFRTSYTHHELGCTLQRVEMEKRQRSPEEIAKYGPLTEEQMERRAKVRGLLALLVARRERRGGVRTPVGDAISNTRSPPLLYTAGDCLRPLKSFRSTRNTPKRRYRTSLSNSIKDLQPPSARMLRVHVERHRKQKTQSVQTAQRWKLRANLNRRGPDSATWDRQGGGQAERLLMEQVLQLRRELDALRAENESLRKYRVNEHLLVDADDSVTTEDGRTRCGKHGERSRYLPVYSVAPEEVLSRVIPVIGPNPTIEQLDAAITLSFQVRDELVNRRGLERYEDVMAGRFLVFQTSELPVKGVQRVALPGTVGSMRWASAPVGILMPASELGLESFYPNAPTDVNCLVIIEADFDSEIPADTLASPDIIRDIRDGTKDVLDRIENVWFDEQGRASRDAGFPSSLTEETETDEDEQPDENGDGPEFSPGKFYLWLEERPPQGVESGEEPAHRWHVRWYERRPDPAVDGVECVGRVITVIAPSASRRRTKTFAEEDDVF

SEQ ID NO: 4635 - protein, 675 aa, Cyanidioschyzon merolae
MYRDVTPIETVEIPHVFFDKIFIRQLTLGTEEAREENERVDVFHEKHPFYSLNGTRYKGDRDIYTYRPMKYITNLKNHLTVNLERFMRRAVIALYSGISRNGKWAIINGIMKDRKREDEVEFVDKTTSKVSTNEASTIRAVIQEDRAGLGLVNPTDKILALKKEKERYYRLVLRYFVFLDRDIERKAEVMLSEETNEEWERRKAFLMGKRFNVVPLGNIKSHFVTIDSRILHGVMREISPEFDFSREDFTGENRETYWMSIFDFKRLKVSKKKVFIGLIETDGVALCIRYWRLKKDRPVPPLAALVTKHEENKEADPVMQEVQDNDLIVDAAKHEENKGAGPATQEVEDNDFIVDVTKHGDEKDADPATQKVQDNDLVVDATKHEENNKAGSEKQKVQDNDFIVGADPGNTNIIAVAAPKRAEDGTDGNLRQKDMRLLRFSRARYYRESAIMNARKEIETWNSGMKDHLEALSEVTSRGADFEAFRKSMGVRVAHWDALWEEYTKPRWARLCMHLYGGRQRAFANFFNQLSALKENENQRLVVAYGAGRWKTLKGTTPAPTTRAYKECARRLFTIPVDEFRTSYTHHELGCTLRRVGMEKCQRNPEEIAKYGPLTEEQMERRAKVRGLLALVSTTSDSKKRMEFVNRDFNAAINIRKCAVLEKRPPESTRENFIG

SEQ ID NO: 4636 - protein, 1076 aa, Cyanidioschyzon merolae
MEVRMAHWDALWEEYTKPRWARLRMNLYGGKQRAFANFFNQLSALKEDESQRLVVAYGAGRWAPKKGTTPAPTTRVHKQCARRFVTIPVDEFRTSYIYHELGCTLQSVEIEKCQRSPEEIAKYGPLTEEQMERRAKVRGLLAIVSTTRNGKKRMEFVNRDFNAAINVRRCAVLETRPPELTRENFIGQPIKVELDEKKLEAVTVFPPLLYTVGVVRLSNGVVGATESMELRLVQFRSLKPYTCNAEHPFRLRGRVLRTLVENRSGRAILALLEPWPSVPAPQQTVVVLVCTGDWTAAGTALAHWDVVEVQNAQVVPLGDICEARDHGLLDSCLELHEYAVVLGPDQREACCAGAADATACKPALTIFKDAGKCNDLSQLANARIMKLSPESIGQTLVVTEHGAGTDTSGRPVAQHESCEPVPRPVVPLDSKHHYLTLEQLRHPGQMSGRTYDVYGVIVDVRAPRLVRTGELLTELQIIDPSIVVTDSDGRLVSFAPPQFMLTSFSSRLSDCVPYIGVGDVVRVHRAELRWFPQQSPSGSKTETLELKTNSLSSMCLWPALAQHDEGAGLGRSSASASGDLSGLRAATATHLEEMNHLPDPLIYAYPSNTKSIVITNSEKCYAMELLRWARALLSQSGFLGSKAFSATLRDILQSSLVVDSANGSAMQRLRYDLVVLIRDLEKTPYEFLLKVTDGSISDLVTVSIAAECWTRLTHRLEPHLRGNWFRLRDVRLDRRPGLPLRLTMNEGSSIYKFPQWMPEVQSRMQHLGAALTDPTCRTDSQSAYEAAPVAHQRALGTRNTPEQMSAAAYPILSAPCTELNRERVAYTTTSHTTTNIESAETGIVKRGPVQHPSCLHCSGPPLLQTSSTMSIPWQALRPQSLAHMLDDMRALRSMRAAGNACARADTPMHRLYRVYACVCDVHWIVDADSRHMLQLLLTDLPFQCPSGSKEAVENQPFLNDDLRFENRKIIASAPTVISAWVLDEDLTTLCTGTNMSWSTAEPERVEAFSQSLRYVLTMPFVWIDVLLVASWGDDLRAERPASDIIKEQSGLQPWVVLIEPVLRVPLWDETDNQASV

SEQ ID NO: 4637 - protein, 459 aa, Cyanidioschyzon merolae
MYRNVTHMETVEIPDEFFDKTSTRQLMFGTGETRRENERVHALHEKRPFYSLEGTRYKGDSRICTYGAMKYITNLKNHSTMNLERFMIRAVFALYPVFSRKAIWAIINGIKNNGQHEDEIEFVDKKVSNENTSEASVIRALFQEDRLVLGLANPAEKISELKKYKERYFRLILPYFVFLDRELKRKAEMMRDEEENEEWERRKAALMGKRFNVVPLCNVKSHFVTINSSVLHGPLKEISPEFDIREEFSKVTNRGAVFRAFREFMETQAAHDEEMWKEYSKPRWARLRMNLYSGKQRAFAKFFNELSALEDDKSHRLVVAYGAGRWVTQKGCTPAPTTRTYKEWARRFVTIPKDKFRTFYKHHELGYTLQRVEMEKCQRIPEDMKTYGALTVERMERGAKVRGILALVSTTNDGKKRMEFVNRDFNAAVNIRRCAVLETRPPELNTREFCGRTSQSGLI

SEQ ID NO: 4638 - protein, 237 aa, Cyanidioschyzon merolae
MQEVQDNDFVVGADPGNTSIITISVPKCAEDGTDGNLRQKDMRLLRLSRARYYRESGIMNARKKIETWNSGMKEHLEALSEVTRRGADFAAFRKFMKVRVAHWDALWEEYTKPRRARLRMNLYCGEQRAFANFFNQLSDLKEDGNQRLVVAYGARRWKTQKGTTPAPTTRTYKEGARRFVTIPVDEFRTSYTHHEQGCTLQTVEMEKCQRSPEDIKKYGPLTEEQMERRARLRGLLA

SEQ ID NO: 4639 - protein, 291 aa, Cyanidioschyzon merolae
MLDATKHEEKNEAGPAAQKVQDNDFVIGMDPGNTNIITIAAPKCAEDCIDGNLRLKDMHLLRFSRARYYRESGIMNARKKIAAWNAGMKDHLESSSEVTSRGADFEAFRKFMEVRVAHWDALWEGYIKPRWARLRMNLFGGTQRAFANFFNKLSALKEDKTQRLVIAYGAGRWKTQKGTTPAPTTRTYKECARRFVTIPVDEFRTSCTHHELGCTLQRVDMENFQRSPEDMKKYGPLTEEQMESRAKVRGLGALVSTTTNGKKRMEFVNRDFNAAINIRRCAVLEKTPPKS

SEQ ID NO: 4640 - protein, 237 aa, Cyanidioschyzon merolae
MQKVQENDFVVGVDPGNTNIITIAAPKRAEDGTDGNLRQKDMRLSRFSRARYYRESGVMNARKKTEKWNSGMKDLPEHLSGVTSRGADFEAFRKFVEVRMAHWDVLWEEYTMPRWARLRVKLYCGKQRAFANFFNQLSALKENENQKLVVAYGAGHWKTQKGTTPAPTTRTYKECAQRFVAIPVDEFRTSYTHHELGCTLQRVEMKKCRRIPEEIAKYGPLTEEQMERSAKVRGLLA

SEQ ID NO: 4641 - protein, 772 aa, Cyanidioschyzon merolae
MKEFSPEFNVSRKESTGENRDTYWKNIFDFTSLKVSKQKVFTGVIETDGVAMCVHYRRLKADRPVPSSIVSVTKHEDEKEADCATQKVQDNDFVVGADPGVTNIVTIAAPKRAEDGTDGNSRQKDMRLLRFSRARYYRGSGVMNARKKIITWNSGMKEHLEALSEVTTRGADSNAFREFMEVRVAHWDALWEEYTKPRWARLLMNLYCGKRLAVANFFSQLSALKEDESQRLVVAYGAGRWRTQKRNYASSNNKNVQETVEMEKYQRSPEDVKKYGPLTEEQMKRRAKVRGLLALVSPTTNGKKHMEFVNRDFNAAINIRKCALLEKRPPQLSRENFLGQPLKVELYEKKLEAVLGGRSRNTGSRRAQRRFRCSFPVTVYAKQAPVEPDNPLQFVINTCVYRGSLFSSASALRCLRGQHSHEAQRRCGVAKLSLRSEPHNEQRPLAVSEQRCVFRCGTYQIIGDRPSAEQGTTFPGEALLLSGSTDTVFVCEGKGAVGLADCGHVLYATERGVVRAAFAPIKDTRDVELAHMYTAQYHVRNILDGFIEQVLFSESEQDTARGRNWQPRFELLSCLRDAVTHMRPPEAVRSVSVLAACLANNGNLLYAVRTGNIGFLVIRDQTIVFSSLNGIEGNPETQRTSITIETCTGDVVPIYLDVFRLRAYDTVIFGTDGLFDNISESQILALVCPVSSAYDSNLAVANRTCLGTFTHIDPVLLSYQLAQLAHNFSSCTNCDPYISERMPRLVCPGKGDDASVIVAQLEPESEPEPESP

SEQ ID NO: 4642 - protein, 1095 aa, Cyanidioschyzon merolae
MYRDVTHVEMVEIPDEFFDKTFVRQLMLGTEETWRENERVHVLHENFAKFCFEVPHESEEPFEHEPRTFHDTRVAALYPGLSRNGKWAIIDGITKDRKREDEIEFVDKKASNESTNEASVIRAAIQERRADLGLANLAEKISELKNGKERYHGLILRYFVFLDRELERKAEMKLSGEKNEEWERRKAFLTGKRFNGVPLCNIKSHFVSIDFGVHNGIMRDINPEFDASREDFTGENRETYWKDILDFKRLKMSKQKVFKRMMESDRVAMCVHYGRFKTDRPVLPSAEPVTKHGEKEKEDPATQQVEDNDFVVGADPGNTNIITIAAPKRAEDVIDGSLRQKDMRTLGFSRARYYRESGIMNARKKIETWNEGMKDRLEAMSEVTSRNADFQAFLKLMEVRVAHWDALWEEYTKPRWIRLSALKEDEGQRLFVAYGAGCWKTQKGTTPAPTTRIYKECARRFVTIPIDEFRTSYIHPELGCTLQRVEMEKCQRCPEDIKKYGPLTGEQMERRAKVRGLLALVNTASDGKKRMEFVNRDFNAAINLRKCAVLEKRPPELTRENVVRQPLKVELYAKKLEAVVGGRSKKAGRRLNVPLNEHLTCVVVYLANAQPGSLVAEQQRTPWPVRNCDGRFRALVWLQPGVNLVAAGPLSGPAKLQFRVHYLDVPWDYVVRAVYVVPRDAVEVRFQAPPDEDCMLASAVRRFALALRLMQTAAAELLHEQGLGHLSFCIERMSAACATPLPGNIEEIHCAYDVPVHVRRLSRTRAELHALSGDALWGMIAEELSNISNRQQCIDVAVMSFTSKDASTGRVYGHTALGGGTLALFGSSGMYAWPQTLSEVPKRFSDRRRVDSINFFDDSAGRGERWALASTTIGAMLHELGHCLSLPHPCRGGGIMARGFDYFYRLFTVQDPDPEREAHEPHWDRSAACRLHFHRHFVGALAVVEQIEPDWASFTAQPAASPLPSPERLEHDARVPYQVANAPHASVTRMLPVTNGASASERPSHPLHAVGRSPRITLDANGFVHIFAPNGIGHIGYYVDGDVADHDEFLDSARPVEYFQIALDDIRRRCRIQKPTSTLRISCIDHLGEINEQAV

SEQ ID NO: 4643 - protein, 503 aa, Cyanidioschyzon merolae
MNPERFMIRSIFALYPGLVRKGIWIIVDGIFNDSKNEEKIEFVDEKASSRRRNEASVICAAVQEHREVLGLANPTEEISELKNDEERYHPLILCYFVFLDGELERESETELGVRKNELSERRKAPLLGNHVSVVPLYSINSHVVSISSRVLHGIIREICSEFSVSREEFTGENRETYWKNIFDSRRQKVSKQKVFTGMIETDGVAICVHHRHLKVDRSIMSSASPVTTNEDEKGAGPATQKVHKNDFVVGAAKHEDEKEAAPATQKVHKNEFVVGVDPGTTNIITIAESKRAEDGIYGNLRQKDMRLLRKKIAAWNAGMKEHLEAMSKVTSRGADFDAFREFMEVRIAHWDALWEEYTKPRWARLRMNLYCGRQRAFANFFNALSALKEDESQRLVVAYGAGRWKTQKGTRPAPTTRTYKECARRFATIPIDEFRTWYTHHELGRTIQRVKMETCQRSPEDIAKYGPLTEEQMERRAKVRGLLTSVSTTNDGKKRMEFGNREF

SEQ ID NO: 4644 - protein, 1294 aa, Cyanidioschyzon merolae
MVPPHPALLRVSGPRTRTQGGDGAGADPGNTNIITIAVPKRAEDGINGNLRQTALRVLRFSRAGCYRESGMINVRKKIETRNAGMKDLLEALRGVTSRGAGFEAFPIFMEGRVAHWDALLEEYTKPRWARLRMNLYGGGREPEAGSGIRSRASTKGCTPAPSTRTYKACARRFVMIPIDELRTSYTHHELGYTLETVDMEKCQRSPEDMKKYGALTEEQMDRRAKVRGLLALVSTINGKKRMEIVNRDFNAATNIRRETSRGGIIREKVETGSRWPVQKECEASARRLEAHCRKRAALPLSARSRSFCVESWTVATLSVSFKVMHRVRSRASFSNRSSEDLVQVPPGLELDEEELALLEQQRQLENALARHEHGNVPRSLSRRILDYMVQSSDGADLRTNQSILGTESRAFPEWSTFQRPVARKGPRYDELRLGELLVRRGHPLPYGVSLSPEGTNFAIFTDEEEHVALILYPAKSRRQLRHERLQSAAAASIESATPVTSNTEKSAPKTDSHSGEHVMDKQTETAPPSDASQETGARESSESTPARTESAASALLRRNRAPFIVRESSTDDEDRFEDVRSNAGSTGGSTPRAMSEGLEDPSNNDAVMTTSALQSSTRQAKSVLATAQILPHQSGLLFPMDWFLPVPSIDDAKPLIIELDPVIHRTGHVWHVQIAPNVEHYAYAWRIGDRPTRWGSNIVLDPYAKCVFSPPSADFNRPPGPYRPICGVPAIGELDFDWDGVLPPRYPFKDLIIYELHVRGLTKQTTSPYAGTYLGVIEKIPYLKQLGINAVELMPCAEFNETEWDMRNPSTGERLCQFWGYSPISFFAPMNRYAMQGFTSAVREFKTMVRELHRHGIEVILDVVFNHTGEFGDDGPPPLFYHFKGLALSTYYILDRKNQFANYSGCGNSLSANHVVTAEFIHECVRYWALEMGVDGFRFDLAAVMCRDPQGQPMASPPVIERLSKDPCLRHLKLIAEPWDLGQYLVGHFPHYGCWAEWNGRFRDTVRRFIKGDPHLIGDFATRLCGSEDLYANGRRPWHSINFVTAHDGFTLYDLVSYAEKHNWDNGEENQDGESHNNSWNCGFEGDGTPNPNIFFLRQKQMRNFLVALLISTGTPMVLMGDEYGHTRRGNNNAWCQDNELNYMDWDKVARDERGLVRFTRLMILFRRVNTFLCRQNFVTRHDVSWIHADWSSAYNFLVMRIIDPGNDDLLVGFNAGPERRTVTVPPLSSDRQWLRIVDTNLAPPLDFCNGDNPTKIYGTYVMQPWSSIILQSHRRSVLIQSLEEHLRGREAAS

SEQ ID NO: 4645 - protein, 853 aa, Cyanidioschyzon merolae
MLGTAETRKQDELVHALHENHTESRFGGARYRGDSSVYTYGAMKTYVTNLRNHMTMKLQRFIIRAVFALYPGISRKGIWAIIDGITNDRKHEDEVEFVDEKKSHRSTNEASVIRAPIQEHRAVLGLANQAAKVSELKKDKERHYRLILRYFVFLDRELERKAEMKPSEDKSEEWERQKAFLAVKRFNVVPLCNIKSHYVTIDSGVLHGIMKGICPEFDGRRTEFTGEAPDTQKVFTGMIETDGVALCVDCKRLEAFLPIVPSASPMTKHEENRDADPAALKVHEIDFVVGADPGNTNIITIAVPKRAEDGKDGNLLQKDMRLLRFSRARFYRESGIMNATKKIETWNAGMKDHVEALSEVTSRGADFTAFLKFMNVRVAHWDALRNEYTKPRWARLCMNLYCGRQRAFANFFNGLSALKEDQCQRLVVAYGAARSKTQKGCTPAPTTRTYKEYARRFVIVPVDEFRTSYTHHVLCCTLQRIEMEKCQRSPDEIAKYGPLTEEHMERWANVRGLLALLSTVNGKKRMEFVNRDFNAAINIRTCAVMERRPSEWTRELFLGQPLKAELYEKKWNQYREASHPLHSRNEDESAQRWLQTGVASVQSIHWDRAVPQLLKHGERVRVLYARYGGVKTFPSSLLEHLRSLERLDLSENELVTVPAALLYALPRLWSLNLARNAIGDLHTTEHRANLSVQAQHEPDPVSGVKPTSPLQWLSLSDNRLPCVPDACRNIVFPCLRYLNLAGNHISSLPKWLSKSFPALEVLILSRNELQTLNIESLRGLQNLRQLCLDHNRLESLPVDLFIELGALQRLELEGNRGHLAEAPTAALSEMVGFTDFDQRRRQVQNKRLSATAS

SEQ ID NO: 4646 - protein, 351 aa, Cyanidioschyzon merolae
MEVRMAHWDTLWKEYTKPRWARLRMNLYCGKQRAVANFFNQLSALMEDDSQRLVVAYRAGRWKTQKGTTLAPTTRVYKECARRFVMIRVEEFRTSYTHHELGCTLQRVKMEKCQRSPEEIAKYGALTEEQMERRAKVLGQLAVVSTSSDGKKRMDFVNRDFNSAINMRKMRGDGRSLAAETMSANSSRAALLLTRQLRDLNKSSVDGFSAGLVSEDDPFRWAVTVLGPPDTPFEGGLFRAELTFPPEYPMLPPRMRFLPPIPWHPNVYRNGEVCISILHPPGDDPHGYEMAGERWSPVHTVESILLSVISMLASPNDESPANIDAAKEWREQPDAYRRRVRSLVRQTLEES

SEQ ID NO: 4647 - protein, 520 aa, Cyanidioschyzon merolae
MCRDVPQMEMVEIPDKFFDKTFIRHLMLGTEKGRMENERVHALHEKHPFYSFKGTRYKGDRDVYDYGAMKYLTNLKNRLTENLERSMIRAVVALYPGQSRQGKWAIIIGITKDRKHEDEIELVDKKTSRKRKNEASVIRAAIHEYRTVLGASTWFQCARSSHICDYRLRRPLRHHEGDQFRAQCQQGGVLRAKKKFTGMLETDGATICVHYRRLKKDRPVPPSAESSAKHEENKEANPETQKLQDDDLVVGADNDLVVPADPGNTNIITIVVPKHAEDGTDGNLRQKDTRVLRFSRARNYRESGIMNARKKIETWDAGMKDQMEALSELTSRRTDVEAFRKFMEVRIAHWDARGRSRIFFNKLSALKENESQRLVVAYGAGRWASRKGTTPAPTTRVYKEFARHFVTIPVFEFRTSYTHHELGCILQRVEMEKCLRSPEDIQKHVPLTEVQLERRAKVRGPLALVSTANDGKKRMECVNPDFNAAINTGKSAVLEKRSPEWTRGNFIGQPLKVALYKKKL

SEQ ID NO: 4648 - protein, 397 aa, Cyanidioschyzon merolae
MKYLTSLKNHLTMNLKSFMIRSIFALYPGLIRQGIWAIVNGNTNDRKREDEIEFIDEKKSLRSINEDSVIRAAIQEHRAVLGLANRAANISELKKDNERYYRLVLRYFVFLDRELERKAEMKLSEEKMKSGGDERLRFWADLATQKVQDNDFVVGADLGNTNIITIAALKRAEDGTDGKLRQKDMRLLRFSRARYYRESGIMNARKKIETWNAGMKDHLEALSEVTSRGADFKAFREFMEVRVAYWDALWEECRKPRWARLRMNLYGGRQRAFAKIFNELSALKENESQRLVVAYGAGRWKTQKGCAPAPTTRVDKECARRFVTIPVDEFRTSYTHHELGCILQRLEMEKCQRSPEDIKRYGPLTEEQMERRAKARGLLALVSTINGKKRMEFVNRD

SEQ ID NO: 4649 - protein, 659 aa, Cyanidioschyzon merolae
MYRDVTHMQTVEVPDELFDTTFIRYLMLGTGEMRRENERVHALCQKYSFYSFEGTRYRVDSCIYEYGAIKYPTNLNKHLTVNLERFMIRAVFALYPGISRKAIWIIIDSIKNDSKNEQVIEFVHEKTLCRKTNEASVIRAAIQEHRAALGLASPAEKISELKKDKKRYHRLVLRYFVFLDRELERKAEMKLSEETNEYWERRKPVLIGQRFNVAPMSNIKSHFLTIDSGVVHGIMREISPEFNVNREEFSGENRETHWKNIFDSKRLRVSKQKLFTEMIETDGVALCIHYRRLKRDRPVPPSAAPVTKDEEKEEAGPATQEVDDNDLVVGAAEHEDEKEADPVMQEVEDNGLIVGAVKLDENKKADPATQRVQDNDFVVGADPGNTNIITIAAPKRAEDGADGNLRQKNMRLLRFSRARYYRESGMMNARKKIETWNAGMKEHLDAMSEVTSRGADFEAFREFMELRVAHWDALWEQYTKPRLARLLMNLYGQRLVVAYGAGRWAPKKGTTPAPSTRTYKECARRFVKIPADEFRTSYTHHELGCTLQTVEIEKCQRSPEEIAKYGPLTEEQMERRAKVRGLLALVSTTSDGKKRMESVNRDCNAAIDIRKCAVLEKRPPEWTRENFIGQPLKVELYEKKLEAVVGGRSQKSGRRLHLG

SEQ ID NO: 4650 - protein, 1301 aa, Cyanidioschyzon merolae
MQERRLYDEKVVKAGLLGHIKDPYRENLRDAIRNRVDSYSKSIVKASSGLMHSAREMYRDVTHMQTVEVPDELFDTTSIRYLMLGTGETRTENERVHALHEKHPFYSFEGTRYRVDSCIYEYGAIKYPTSLNKHLTVNLERFMIRAVFALYPGISRKAIWIIIDSIKNDSKNEQEIELVHEKTSCRKTNEASVIRAAIQEHRAALGLASPAEKISELKKDKKRYDRPVLRYSIFLNGELARRADMEQGVEANAVPEKREAALLARHFNVDIMKEICPDFDVSREVFSGENRETFEIEDILLRFQTPQSEQAKAIRGDDRNRWRSHHEDEKEAGPATQEVEDNGFIVGADNDFVVGADPGNTNIIAIAVPKRAEYGHDGNLRQKDMGLSRFSTARYYRESGIMNARKKIETWNAGMKEHLEALSELTSRGADFEAFRNFMEVRVAHWDALWEEYTKPWWDRLRINLYCRKQAAFKKIFDEFSALEEDESQRLALANGAGRWAPKKGCTPAPTTRTYKDTTNGKKLMGFLYRDFEAAINIRACAVLEHRPPELTRENFMGQPVKVGLYEKTMKPVAGGRARVTRHYYTSDRSNVWWVKAARLISSAVLEFIPQLRELLRIAISRQVSRVFAGTYGSSMETKASRVAFPQLAALGSLHGQLGDVLFHGRGKARRTSTPASAVSSSCILAAEAVPVAAGVAHPVLRGAHLRAHCCGQGADAPVGSSTAAVRKAVTYTVLYAASRFGMQLLNDGQRYAWLTVSQTATRAIALTTFAHLHSLSIDFHWQRRTGEVIRVMDRGVASLGEVLSVFVFTVFPTAIELLLVLWVFFAMGSFWIAITVLVSVLVYGVYSKQLTEWRTSYRKLYNERDNAAEARMVDSLLNSETVKLFTAEAREVNRYTEAYVALQESERTLIATLGLLNSGQSVIISLGVGISMVMATRRVARGEASAGDLVMVNAYILQLYQPLRWLGSAYRQIMRALTDLDKLSRLLALEPTVRDLPGAPALRRRHGQVEFHQVTFHYDVLWSGTEPGAATRAQMPSTATDTATATSSSSGGGGGAGGAGGVHNLSFTIPPQRVVAVVGPSGAGKSTIVRLLLRLIDPQQGAVYIDGQNIAHVSQQSVRHAIGVVAQDPVLFNETIAYNIAYGVDAAATPACIEAAARAAHIHDFITKLPDGYQTVVGERGVRLSGGEKQRVAIARAILKNPSILVLDEATSALDTATERAIQANLMEMRTGRTTLVVAHRLSTVIDADEILVLNGNGEIVERGAHAELVSRPQGAYRAMWEAQARAQVTTSDSVPSTTA

SEQ ID NO: 4651 - protein, 997 aa, Cyanidioschyzon merolae
MHLARGMYRDVKHMETVEIPDEFFDKTFSRQLMFGTGEAPRENERMHALHEKHPFYRFEGNRNKGDWGIYDNGAMKYLTNLKNHLTVNLERFMIRAVFALHPGISRNGKWAIISGIMKDRKHEDEIEFVGEKASNESTSEDSVIRAVIQEHRAVSGLTNPAENVLDLKKDKERYYRLVLRYFVFLDRELECKAEMKLNGTKNEDSGRRKAALLGKRFNVVPLCNIKSHFDTIDSRIAHGSIKEISPEFDVRRTEFTGGNRETYWKNIFNFKRLKVSKQKVFTGMIENNGVAMCVHYRRSKVDRPIVPFASPSAKHEESKEADPVMQEVQDNDSVVGADPGNTNIVTIAVPKHGVYGNDGNLRQKDMRLLRISRARCYRESGIMNVRKKISAWDAGMKDHLEATSAVTSREADFKAFRKFVEVRVAHWDALWEEYTEPRWARLRMNLYCGKQRAFANFFNELSALKEDENQRLVVAYGAGRWTTQKGCTPAPTTRVYKECARRFVTNPMEKCPGSPEDIAKYGPLTDEQMERITKVEFVNRDLNAAINVRRCAEPFMGPAAAQPPQLAAHGLDESGSFRDSGTGVFEDSYTAQGGFAELKAQPLSEASMPRRKHQTERGKLGRVDGLFEEAPPGDSVVIDTVTAENGSSSARRRFEWRLALRRLTFRLSAAVGAGCLQRHGVAATNACFTPGYRDRSPFGTAVSRGVSAHHRDDAVRARRNSDHRYGPGGSHWNGRWLEFGLGYPAPARYPGDNARHAPASDGTACWWATSDRTNCPIFVIRHHDMLRIGAGIEQTQFHPNDWRAGTAYRRAKPSGCSRRPADSCVSTSATRTADGTAHNGHDLAGCTDDSDRGRELECVYSAIDCAVALNAAFFINAAILITAASSFWANHVQVATLQEAHALLERVLPIRLWGRVEVAPLVFGIALIAAGQTFSADVATAITDAAMRGRAERAGYHPTWAREHLQALNSFPGSSIASAAIRDCAHDSIHWEQGTHG

SEQ ID NO: 4652 - protein, 882 aa, Cyanidioschyzon merolae
MRLLRFSRARYYRESGIMNARKKIETWNSGMNEHLEALSEVTSRGADFKAFREFMEVRVAHWDALWEEYAKPRWARLRMNLYCGKQGAFANFFNELSALKGNEGQRLVATYGAGHWMTQKGTTPAPTTRTYTECARRFVTILVGEVRTSYTHHEVACTLQGVGIEKCQRSPEDIKRYGPLTEEHMERMSKVRGLLALGSTTSDGKKRMEFVNRDVNAAVNIGKCAVLEKRPPEWTRENFSRQPLKVELYEKNWNQYDTDLSSLECSVGDDRLSDTALSGLVSPRAGSPPLSADSEELAPDRTPESLDWMQLVAQLARLCRVEERGDRSSGTVLSQPSEQCLALEEVHPTDLNATGQPPVTSTNANPWTTQLEHHLNCLICAELPREPLLCPSCGVLFCERCATKWWREPSTASSQGHRRIASTQPCPHCRQPVARHELVLVRCLRELLQNIRRGPKLALPEQPAEKNPGAPRSLSALKATLWCCSVHAHEAVRYYCQRCNRFICAECCAPLPECEHRYHPLERAHERLQSLASELEQGLQPLRERLQRFECQLLEYEQTSRFFLRQREALSQRIQRFMDSVLEQIDTQVQQRIQSQQAARTRLVDMRMHLRRLLRDMERRLLAYRQDIAGHYAERAHALPSSAESLLRAHQEWKERWEALSALSVIDASDAVCSAWSESAGTTMLVALPEDQAPIPLKCAVLPPFAWARVPGTLKVCGLRWQVQWMDACSWDATRSPRIPDRKTPPRAQRPTPSDGVAAHAGPLARSESRGLLVKLEHRPGLEREPEDIRLQLEFVVMHQQRSVWGGLFSVNATDGWQAMLDVPDTVVVLVERARCPQDELQVGLRFPDIVEHSKQQTAYIQWMEQRQAPDQESVDRSRSAI

SEQ ID NO: 4653 - protein, 1175 aa, Cyanidioschyzon merolae
MTSHGRKNKDSFIRAAIQEHRSVLGLVNPAEKVSDMKKRWRKMLSPHAALFRVFDRRLERKTEMEVGAGHKSRVGATEGYPSGEALQRLSVMQHQVALCEYRLQSRSWHHEGYLNGARCKQGGVHRGKPGDVLEAYLRLQTCQNEQAKVCIGISESDGVATCVHYQRLRVNRPVPSSVSPVAKHEGNKKAGPTTQEVREHDFVVGANPGNTNIMTITVPKLAEDGIEGNLCQKDTRLKKIETWNARVREHLEAMSEVTSRGTDFGAFREFMDVRVAHWDALWEEYTKPRWARLRKNFYCGKQRAFANFFNQLSAPKGDESQRLVVAYRAGRWKIQKGCTPAPTTRVYKECARRFVTIPIDEFRTSYTHHELGCTLQRVEMQKCQRSPEDIAKYGALTEEQMERKAKVRGLLASVNTTNGKKRMEFVNRDFHTPINIRRCAVLEKRPPELTRANFVRQPLEVDLYEKKLEAVVGGRAGFSPLLYTAGINVFLLKGVCFQEWMSSSNTGVRVPAAASDVESTDTGYEQDEEQLPNQQDSEATDPEVQFDGGTDWLNSSEAEPVELSRAYSAPEPLDEGPKPNLLDISSAWGQDFVERADSELESYAEEHPGPEEHGASQQERQRSRSYLRALRAKMDRTWRADWTHRLGRTLDGTVDRARPYWRHLRSSSGLRRRVLSRSPSMLLQNLNHSRKIIARKSVEAASEAAEFISSPTLLFRPAKMAFAIAFPLLIPLLITPWRILLILFVFYAVWYLVVAAIFATEVMMRPPWYRVGLGGQLPMVEIPPYWRGVCHNPKQDLQLDYVSVSFESLHPPRRTLRGWYIPAESTGMTFESGSEQSAPETGAAKPSEASSADAPNPHATTPSGEHATTSRSRGTTSTGRTCVVCVHGAGRDRRNFLRHAGALHRHGYDVLLFDLSEHGLSDGSGRGTTFGAREKYDVLAAIAYAYNALQAERIVLLGTSAGASSCLLAAAEWIRLHRFLKLQIVGQRHESSQALSEQHSLDFPVQCIIAENPLARPDELFIFHLERLSLNYLPKDSYHLARKTLFWFASRVLLFRLAWVDREPSAVPGSHLRRLWVVISTLSRVLGGRTRCGAVDVMTDIHCPLFVLHGTGDEIVPVDHGMRIFAAANEPRQLWLAPDAAHCALFDQYPTEWENRVVDFIEKSLSEESNAKSRS

SEQ ID NO: 4654 - protein, 357 aa, Cyanidioschyzon merolae
MCVRYRRLKKDRPVPPSAAPVTKDEEKEEAGPVAQEVQDDDLVVGAAKHEDEKEADPVMQEVQDNAFMVGAAKHEETKKAGPAVQKVQENDFVVGADPGNTKSITIAAPKRAEDGTDGNLRQKDMRLLRCSRARYYRESGVMNARKKIEAWNEGMKDHLEALSEVTRRGADFEAFRKFMEVRVAHWDALWEEYTKPRWARLRMNLYCGKQQAFANFFNELSALKEDESQRLVVAYGAGRWKIRKGCTPAPTTRTYKECARRFVTVSIVEFRASYTHHELGCILQRVEMEKCQRSPEDIAKYGPLTEEQMERRAKIRGLLALVSATPNGTKRMEFVNRDFNAAINIRRCAVLEKRPPS

SEQ ID NO: 4655 - protein, 662 aa, Cyanidioschyzon merolae
MVGAAKHEETKKAGPAVQKVQGNDFVVGADPGNTHIITIAAPKRAEDGTDGNLRQKDMRLLRCSRARYYRESGTMNARKKIEAWNEGMKDHLEALSEVTRRGADFEAFRKFMEVRVAHWDALGEEYTKPRWARLRMNLYCGKQRVFANFCNELSALKEDESQRLVVAYGAGRWKIRKGCTPAPTTRTYKECARRFVAVSIVEFRASYTHHELGCILQKVEMEKCQRSPEDIAKYGPLTEEQMERRAKIRGLLALVSATPNGTKRMEFVNRDFNAAINIRRCATVFPPLLYTPDVVQVRTAFGARVREHDLPTRFPGKQRVGVEEIDMHLWFRWFFWFTVFWVLLLILASHRVLQTLMVPSPGLETSSPSEYRSHTVNFSWQAPVLASLFNEKPLAEYFQNISDLWRREQEQSFVGVIVFAKQQRLLCSIPKAGCTAARAFALRETLGVVLDPLDADEIHLIHPQGRANLTQLLHLQDEELLRVLSDPSWKFGALVRHPLTRLLSAYLDKVKAGRELERYPLKNRYPHSFERFVDYLEEAAKTMTPDLTPFDEHWRPQSGFCLFRMLPRTFFDCIGKVDEPESLRKFYVDMFGQAGLEWHESMRKRAQASGRNTLHSQSAASLLHKHVNERLAQRVRKLYAEDYERFGYDLWPPYYRKASATL

SEQ ID NO: 4656 - protein, 392 aa, Cyanidioschyzon merolae
MKEVCPESDVRNIEFNAENRETYWMNIFDFKRFHASKQKVFTGVIETDGVAMYVHDRQLKADRPIPFLLSILTKRGEKEAGPAAQQVQSNDFVVGADPENTDTVTIAALERGGNGIEGNLRQKGMCLLRFSSAGCYRESGSQRTPSSDQPGDEPSGGRSSFSGIRESSRFSVRGAVERVHKAPLGSSAYQLLLWEAACIRQLFQRAERPQRGRESKARVAYGAERWASKKGTTPAPSTRAYKESARRFVTIPTDEFRTSYVYHELMCTLQRVEMEKRQRIPEDVRKYGALTEEQMGRRAKVRGLFALPCTGGGKKRMESVSRDLIAAISIRRCAVLKKRPAEQTRANFAGQPFSVEMYREMLKPTEAGRSRKTGRRLRVDIHLPLMIVGHCA

SEQ ID NO: 4657 - protein, 729 aa, Cyanidioschyzon merolae
MEQRALPCATDRVDDVGIAQTKPLLVRSSAGHQDAGGYRGEAFAPGNGIPAAKSAPELHARKRSTFVDAVKHEDEKEADPSTQKVHENDFVVSADPGKTKIVTIAASRRAEDGTDGNLRQKDMRLLMFSRARYFRKSGIMNARKKIVTSRGADFEAFRKFMEVRVAHWDALWEDYTKPRWARLRMNLYCGKQRAFANFFNELSALKEDEIQRLVAAYGAGRWKNRKGTTPAPTTRTYKECARRFVTIALDESRTSYTHHELGCALQRVDMEKRQRNPEDMKKYGLLTEEQMERRAKVRGLLALVSTTIDGKKHMEYVNRDCNAAINIRRCAVMEERPPALTRENFMGQPLKAELYETKFEAEVRGRFKKTGRVARHYCTRSASFDSRMAFSGSSPERERSGSWIPNGSESFFGSEGSEAPEGAEGLGTVYTPVLNAAQRAKLEALSELVRSAAELNLTPTEKAWMDEACLSRFLRARRYHVQKAFRQLHETIVWRRSFGVEQLMLDPELADVKRQSETGKLYVHGKDRFGRPAVFMKPRLQNTSERKTAHEQMRQLVYTLERAVAEMMPPVEKICLVIDFPGYSLRNAPSIKVQRQTLKILQDYYPERLGFAVCIDAPAIFWTFFEIVKPFIDRRTSAKIQFCSRKAKEGTKQNMRTLMNQLFDPEALEIELGGRSAWRYSNEEYFRERVLPEYLRIKSYPERVEMIPCAEEDVNNTQDVFYDSMSCLD

SEQ ID NO: 4658 - protein, 385 aa, Cyanidioschyzon merolae
MQKVQDNDFVVGADPGNTNIVTIAVPKRAEDGADGNLRQKHMRLLRFSRARYYRESGIMNTRKKIETWNSGMKDHLEALSDVTNRGADFEAFRKFMEVRMAHWDTLWKEYTKPRWARLRMNLYCGKPRAFANCFNELSALKEDKTQRLVLAYRAGCWKTQKGTTPAPTTRVYKECAGRSVTIPIDEFRTSYTHHELGCTLQRAEMEKCQRSPEEIAKYGPLKEEQMEWRAKVRRLLALVSTTSDGKKRMELVNRDFNAAINMRKCAVLEERPPELTRENFIGQSLKVDLYEKELESVVGDRSKKAGGVWTSVGDVLSRARFSRHYCTPLASFDFRTAFGVAMRGKTSIIPSTSESHSPCFFSDILVDSYTLSSDRACLAASAPVV

SEQ ID NO: 4659 - protein, 904 aa, Volvox carteri
MALNCDLSAFTIDQLMDALQDPAQTCENIGILRNEIKQRVLTVLSTVVAVPDVTPVVELVFACVKGQFRKFNMCGGNVADKWKKQGWIDFAKANDVDLSATAPAAADAQSTVHVSPPEMPKVPEAATTCKDSTPASGAPPGGTSTHGCNAVALSVVKCALKKAMSLTDEEFGMFSAQVEELVQYDTTSVKRVTNYQPGARARITVTRDKTTKEEKVTLKVTGYEAKVTEKEVSDFNQPDGLDQVIQYAGIGFKTVVLNNVWYPLFARLGRLTKAYMHQMCKKHHHKKTPWSKAHAVVQLIRSGKPIPAWPAYVVAYIKNARAKLLDAAGSTMYGSLNGHALQARQDELLSAHENKYLWDDHAKKKMTFQAAMQFNFWMQKQFESLHQKKMRLMPVFAVKRSHVRLDTKSLLHIFCSLFPNDHNVKLMKSFWNQDAFLEKCGLPGSAHPDTYMLPPKPPDGTTDKALLAQYQSACSRIRNTDAYRSQQARHRALSETEDRVVKSFFRCLPVKNGYKFDCSISTDGVAVSLQYSKPSKAVTAKRKRSAGMRSSNVATDAYDQNLDMYDPEEGVLTLGLDPGRCSLATVSVVTQYTLDSTGKLKLGEKLNRHSWSLLRGEYQHKSGIRTSTIKKAQRDAPLQPAFQALAVPGCALRTAQSGTVLRYIADSQHCMNEWWERALSRQEAMASFQGYIGKRKALDSFFSRVLKEAKKLVPKRTKIEVAYGESGITMSPAGKGEVAVPTTGTFKACQRCFGKSAVVPTNEFRSTMMRWESGSKTHAVYKEFRAAEGQDCVKEVLHGTDQKHGSALSASDPRLPFVVAWQARRASKDKQRRGAVVGTTEAEFESATGCNVTFPMVQGNAHVLQPGHPRSKHHRSATHHGAEGAGTPGSVLPRGQSMTVLLCE

SEQ ID NO: 4660 - protein, 339 aa, Eremothecium cymbalariae
MKLKHLREVTPLKKNYNYDEDPKITYLKQVPFLIKDNGLRDFDKDYRTNLAKSKKSLKPFKLHFKRIRDKQSMAVEKKVWGLSRGIFYDLFNAKTLRSTEPLPEKLPHDSRLIREYRKWFLVIPFESKVQIPKPDQSVNAVAIDPGVRTFLTTYDSSQKVLEIGEDGYLKLQHLDRRLRSLQSDIHKLRSKCALPKQYRKLKIRNRRKVIRRLYQKKKNLANDVHRKASSLLASKYNYILIPVLNFHNFKKANRRVKANLANMKHCLFVQRLKNKARHYENTTVIEVDEEFTTKTCSSCGTRSNIGASKVFKCGNCESIFDRDHNAAKNILLKYLGEIA

SEQ ID NO: 4661 - protein, 472 aa, Saccharomyces delbrueckii
MTTSTQNQAKKRKTSKKNTSRPFWNEDAAHHSKQWSLNTMLPMAAKKLSQKINSDSWXKHPQTPIINHSLKLPLSSAVKEEITRARNIRIYPTNIQKETLKKWFRCQRYIYNKALKMHNDGMLMNIKILREKLLNKKTSVFEPEEQWLSEYHYDLIKNYISNMAKFKKTRAPFKLKFKTKKAPVQTLSVLKKYWNKGEKTFYSDIYSFSSMRGAEPLPEELPRDSRLQKTRNNLVVPMAGEQIARKSPAEEFIFIDPGVRTFMTGYDSNQNVVEIGKDAVVRIEKLKRRRRQLQSKLAKLRKHKKSQNHRKALHRLDGRISHIVQDMHKKSALFLCKSYDNIFLPKLNYHECTKLTRKSRSNMATLAHCSFHDRLTMKAEQLRGASVHEVEEDYSSKTCSSRGNLKDDLGSAKVYSCIKCASVFDRDFNAAKDIMLKYICEHLMASGESSITSASSGGNGGFAMMGPGPFVR

SEQ ID NO: 4662 - protein, 399 aa, Copidosoma floridanum
MSVSVFDLSKVAEDKKKHTFAWRISCNDVEVSVHLYRIRADQSKSGRSANLNRYAKLDKNERDARAEEEVKKKAKKKTTKDGNLNSADYQRQKYTRYVGVDPGLITSFATYVVDVAKRNEARQSRTCVDPRGTDEFEMVSSRWFRCESGYVTRKWRSKHYMRQITAEVADLGHHFPGLILQRRTDDYTTTRYRLNYYKTIGPLMRKKFWSRQMFDRKIRALSLVDQLVNKLVYGDYEGEERKAVSTFMALGKTKFGNRIRGHTRIPMLLIVKRLEDLAKNHPENLKIYRSDEYLTTQLCAVCSKQMDVGTGKNSRRSDCLNLVRRGQRRIKCSKSWNRDQVAAKNILQNAILACGLPEGPRDLRHPQNFERPKRREIVTAMERRVLEQYGYDEEVHEQS

SEQ ID NO: 4663 - protein, 999 aa, Auxenochlorella protothecoides
MALLACRHAAVIAWNAYKWRDPLPEDAKVHLYVGIDPGRTKMFTAVDEHANVTSCSSKEFHAMSGSKRREKTMAKWHAKAPPYVKKLHQCPTYKTASTEVLLSRVAWIVPTLRQGLTWHRDEKPFRKLHHQAYVGRERAINRLAEQFRPPPGMTTVVGVGNWVVVVDEHRSSKLCCACHATLHAHQYVRVRRGEEKLVDVWDTKRCVNKGYRVHVVNRDVNGAANMLMLTKRDPLPEDAKVHLYVGIDPGRTKMFTAVDEHANVTSCSSKEFHAMSGSKRREKTIAKWHAKAPPYVKKLHQCPTYKTASTEVLLSRVAWIVPTLRQGLTWHRDEKPFRKLHHQAYVGRERAINRLAEQFRPPPGMTTVVGVGNVYVRVRNGEEKLVDVWDTKRCVNKGYRVHVVNRDVNGGVNMLMLTNGSATRGLIGVQGPRPALRRSGVPTRPARRGAAVTRAAKQLHFNTDGEALKRMQAGVDKLASVVGVTLGPKGRNVVLETKYGSPKIVNDGVTVAREVELEDPVENIGAKLVRQAASKTNDLAGDGTTTATILAAGIIQEGMKIVAAGVNPVQVIRGLERTVTHLVAELAALSTEVSDNELRDVATVSAGGNAVIGELIASAMARVGRAGVVTMEESKTAEDSLQVVEGMQFDRGYISPYFVTDPERMVAEYEGCRLLLVDRKIATARDMVGVLEGAIRGGYPLLIMAEDIEQEALATLVVNKLRGALKVVAVKAPGFGERKTSYLEDIAILTGGTVVKEEMGVSLDGAGEEVLGTAAKISVSKESLTIVGDSSTAEAIAARVRQIRNMAAETEAEYEKEKLNERVARLSGGVAVIQVGAQTETELKEKKLRVEDALNATKAAVEEGIVTGGGCTLLQLAQRIDAFRGSLDNDEQRMGADILRRALPYPLKLIASNAGDNGSVVMQRVLDGGSPAFGYNAATGAYEDLLAAGIIDPAKVIRCALENAASVAKTFLTSSVIVTEIPQEEGAAAAPADGGYGGY

SEQ ID NO: 4664 - protein, 746 aa, Auxenochlorella protothecoides
MDVDVVAADDAPSTSRPLASAGQDSQTPPVPLGVVNKLDDAEKREQQWQNDATVNEWRKAPGEAGTLGRFRKVCEDLAIDDYATTSIKTTWNGFRDLPKKKTKKKEKKKEIKKKAQQQQPVLDALRPTVDDVVAVISELRTVGDLFANFHAIRMVEEFERRKQADRADADAALQPLDEIFFARCMTLIWRPRKAASTNAGAGARAAFTPLAESVALFRETLERTGVTLQPPDLEHIRPFIDEAAGDLATATSTYYKRELLRHLQQNAKLELGAKGNWPRHCARAVLSTPGDAPQGQAGEEATQHDANCPDVSELKRKVEERAKQHAANKGAGIPSKRRGLGKQRRAALAKRKEAAANAAGGPAKGPQQPVQERHIGRLFSLLPCRQSFEAVHITGTLTTLGALLRRHEKRNKGGVARMTRLQLSTEKEWRMYTVPEALKFLNLEEVHGIPARKKQAIEACLRRKAEEYQVDAEGKRGKKKTGETGEKKTDWFVHTSGKRTRGGAPLGAPQGRGIADEYYRRDPPPEDARIDKYVGIDPGRTKMFTAVDEHANVTSCSSKEFHSMSGSKRRERAIAKWHGNAPPYVKKLYQCPTYKTASTEVLLPRVAWIVPTLRQGLAWHRDEKPFRKLRHQAYVGRERAINRLAEQFRAPPGMTTIVGVGNWVVVIDEHRTSKLCCACHTTLHAHQYVRVRNGVEKLVDVWDTKRCGNKACRVHAVNRDVNGAANMLMLVKSHLREAAVQSAQAR

SEQ ID NO: 4665 - protein, 579 aa, Auxenochlorella protothecoides
RNRPPEDAEVHLYVGIDPGWTKMFTAVDEHANVTSCSSKEFHAMSGSKRREKTIAKWHAKVPPYVKKLHQCPTYKTASTEVLLSRVAWIVPTLRRALAWHMHEKPFRKVRHQAYVGRERAINRLAEQLRAPRGMTTVVGVGNWVVVVDEHRSSKLCCACHATLHAHQYVRVRNGVEKLVDVWVTKRCTNRGCRVNVVNRDVNGAANMLMLTKCFFANALRPTAFVTPSLLHPWPLPGLPPGLELFIKRDDLTGMQLSGNKVRKLEFLLAKAKAEGHDSVITIGGIQSNHARATAVAARYCGLDSHLILRTSRLAADSDPGLVGNLLVERLVGAHIHTVTKEEYAAAGSRALTAQLERQLRGQGANPYVIPVGGSNGLGTWGYLSFVEELRGQAADLGLTDIVLACGSGSTAAGIALGSHLAGLGVRVHGYAVCDSEDYFYAFIDDLLDQVAPAEARGGAGARDLIRIAEAKGVGYGISTDEELATVLDAAQATGEAPNLNPAPNPTFSLSSAGIILDPVYTCKALHGWLADVAADPAAWAQRRVLFVHTGGLLGMYDKAEQLQGPVQALQRAHRLHVQS

SEQ ID NO: 4666 - protein, 530 aa, Auxenochlorella protothecoides
DAGTPSKRRGLGKQRRAALAKRKEAAANVAGGPAKGPQQPVQERHIGRLFSLLPCRQGFEAVHITGTLTTLWALLRRHEKYHPGGVEKLTGLQLPKSDDWRMYTVPEALKLLNLEEVHGIPARKKQAIEACLRRKAEEYQVDAEGKRGKKKTGEMEEEKKTDWFVHTSGKRTRGGAPLGAPQGRGIADEYYRRDPPPEEARIHKYVGIDPGRTKMFTAIDEHANVTSCSSKEFRAMSGAKRREGLIAKWHADAPPLVKKLHQCPTYKTASTAVLLSRVVWIAPKLRQGLAWHRDEKPFRKVRHQAYVGRERAITRLAEQFRAPPGMTTIVGVGNWVVVVDEHRSSKLCCACHATLHAHQYVRVRLGVEKLVDVWDTKRCTNRGCKVNVVNRDVNGAANILMLTKPLPLVGACRRNSLLSVAALGRDRDDKKPKDSAGKKPQGNWRQFSPKSEKPGRQLLDTLELVYATTQWPSDDTIQSFWVLHRMPRHQVVEWFAHRRRQERVRPQTWEADPSNDYVRIAGQEEDPGRG

SEQ ID NO: 4667 - protein, 623 aa, Auxenochlorella protothecoides
ALKLLNLEEVHGIPARKKQAIEACFRRKAEEYQVDAEGKRGRKKTGEMEEERKTDWRDPPPEEARIHKYVGIDPGRTKMFTAIDEHANVTSCSSKEFRAMSGAKRREGLIAKWHADAPPLVKKLHQCPTYKTASTAVLLSRVAWIVPTLRQGLAWHRDKKPFRKVRHQAYVGRERAITRLAEQFRAAPGMTTVVGVGNWVVVVDEHRSSKLCCACHATLHAHQYVRVRNGEEKLMDVWDTKRCTNKACKVNVVNRDVNGAANMLMLTKSWMLTQPRLQQDLVRRCSSMWEMAVATALRRMRHAPQCDATTHHADTKTCMHCGTTKELAVFRGSKNKTDRLQNRCKECEVALGRGAKRDKNGPLVVRVEQKLCRRCSEVKASDLFFHSKLSLDGLCTYCKACQKELNKQARAKRPDVLRPQVQEKECRHCGLVKPADQYFKSRMNTDGLYSYCRSCATLLNSASKKRRRAQLRSDRGAGAAPAAPRHIQNSQQRSSEGAAGLHATAPALLGSSFPGYSGGGLVLPAGLYPTSAPPAAGTLAEPLHGQYRAQPPHGGGMLQEYALIQAMTLAAGLDPSDPDATSQIQAALAMQLAMAVAASGSHSAVAAAGGHARPTPERGGELG

SEQ ID NO: 4668 - protein, 1154 aa, Ziziphus jujuba
MSKDNIREHSAPVYEGIENAPARSMMRATGFQDADFERPFIGIASTWANVTPCNMHIDGLARTVEQGVSAAGGKGIIFNTITISDGISNGTEGMKYSLLSREVIADSIETVVGCQAYDGVIAIGGCDKNMPGCIMGLARLNRPGLFIYGGTIKPGEGHTDMISVFEAVGQYAKGEINAIQVKHIEEVSLPGPGSCGGMYTANSMASAIEALGMSLPGSSAQEAVSEDKQIDCARAGEAVMNLLRLDIKPRDIMTKAAFENSIKVLIALGGSTNGVLHLLAMAHTAGVELSLDDFVRIGKDIPVVADVRPSGKYLMSELIAIGGIQPLMKRMLDAGMLDGSCLTVTGKTLAENLADVQDYPEGQQIILPFDAPVKKDSHLVILKGNLSPKGAVAKITGKEGLHFAGPARVFEGEQGAMRGILDGEVQPGEVVVIRGVGPKGGPGMPEMLKPTSAIIGKGLGASVALITDGRFSGGSHGFVIGHVTPEAYDGGPIGLVQNGDQISINAETREMTWHVDEPEIAARQAAWIKPKPNYTHGALAKFAKLTSACLQQKIRDLAQAWGKFYNKKEQARLKQNKRKPRKPNFFKLADGGEIQLRPLMPRFKKKSDGEQSFRLPFADCEQWRGGLLVKVDPKYTSQTCSSCGHVAKENRLTQANFSCVECGFSENADINASRNILAVGHTVLSVEGRCGKDRPVKQKASEIREEIQFFELHTVIFVEADLMSLLRRCYLAVQQLPQLEEILSPELKPLKVIISSEHAEAPNQMSFDEWQHYTINDAKILSKQHRFSFHDTPELPSAEALKQAELILRHTPLRGQDFLYLLEDVFHMLWQKQTGKLRTLYAMASRHHQPQDFPERIFDQTPILASYFNLGGRQYQAVDDLLRLTRRLEQQKLLTGNPIFMIDHIEWREHLISDAEELNEIQSMDPELDLYIALEDPISWLLLAYIKEELADYYNIQLNVYPLSYRGRDEFDWSLATRLSKRTDVEFTPFCRPTEQAIAPMAQLFYSCPEEQRIEAMYQILQAIWIRGEDLSYAPHFKHLQQQLNIVDLTQDDILAKLQDNDMLCEMKSQPNFPIDAIDTALVELIAARQFYVDQTTRFKKTETDLQSPERMEQIVENVRALAQKQGLDQEFIEHLYREMFQYFIQRELKEFRP

SEQ ID NO: 4669 - protein, 226 aa, Phycomyces blakesleeanus
MQIDTRILCQQILRTTGTAKLDKLELCGRVTDGVGVSFLTQTQGTTKGPTSRRASIIKTENIYYVHNFDEYLAKTFRAKFGQNFVLVMENWSVPNNRYHKPIKGKILRNLLCKHGFDACLINEYATSRHCPRCCQLSLQTFKQVENPRPYRRTQIPTRTRHSLLRCTNLNCLENMDGSEVMHRLWNRDLAAVLNFRHILNQVSHDDTISERFTRVIQIGLNRIQAE

SEQ ID NO: 4670 - protein, 297 aa, Rhizopus microsporus
MLELPYKPKNSIKRKDTFEEKKNAKRARNSISSSTRGSICKPCGNIDHPFARSKEWPNHNFTLQELIERNFGSRYQRVVNENLSIEQLQLKYSRILFLVDTWIELSGTEGIDLTVKEDGLSNYGKYYQVHTSLKLHDFTSEEVDRYFRPCTVDPNRKDVFVSHHGNTGIRRLSSTEYYNMSGNHMGVSPNFYSFETARIKWCNYIGSQRAAENAVNILINGPAIPVSKITYKISCGNDDDTREIHQISICKSCDIYWNRDVMAAKNMFAIAESIWNGHGCPNVFKRHCATSNVVVSL

SEQ ID NO: 4671 - protein, 404 aa, Rhizopus microsporus
MGYIIDEERYALETATSTADEDAKHDVDVCMKEASSKRAYALYTDQDKVRFFKLMFVKVMSASAAAKQLGIHVRTAQRWAQMYKTDADSVFIKHKKTGRSRILHEEHKQVILEYINENPSSVLDMAWSKKGLPAVVTVPKTRAQTTTILGAISALGLIKCSLRLPQPPAKKRKRKGYVELTSIGTVIGHYFSFLKATMDEMDQCPHMKWYYLAMDSAPSSTVSVEGFGRFLQARSEQRAVLNRFYGHTTTNHDNGYSLFRKVRLSAYFNKQRADQKLIQDLRAKFGEDAVFVIGNWSTPHGRYYEPIRDLGFRRLLKKHEFQVFLIDEYKTSRPAMAAPDRYRLWNRDVAAFLNYMHILRGLRHNGMVSHRFRRVAVASTRHRRRVNDQEQPRIRIRLGDDSPS

SEQ ID NO: 4672 - protein, 377 aa, Rhizopus microsporus
MNFQIFFEDGHGNAVDEYGRPEPMVYIIDEERYALETVSSHTQYLHNQPQENNFDVGSVTDGDAKDDPDACMKEASSKRAYTLYTDQGKVRFFKLVFEKVMSASAAAKQLGIHHKKTGRSRILHEEHKQVILEYIDESPSAVLEQVMEQLLQKLQDLKVSKSTVYNFARTECAISALGLLKYSLRLPQLPAKKRKREGYAEQTSIGTNPDVVQAKPAVLSRFYGHTTTSHVNGYPLFHKIRLSAYFNKQRADQKLVQDLRAKFGEDAVFVMGNWSAPHARYHEPIRSLGFRRLLKKHGFQVYLIDEPAMAAPDRYRLWNRDVAAFLNYMHILRGLRRNGMVPHRFRRVAVAPTRRRRRVDDQEQPRTRIRLDDEYPS

SEQ ID NO: 4673 - protein, 586 aa, Rhizopus microsporus
MFKSIIQKKKEQVINKRKSTGNIDDTFEDMICKDCQEIGHANKSYYKCKFYKEASVDDVTDKRVTNSAALPEGLLENWNLFRQSHGSIIYTKKPASGTSQCLSESCVQLATTYTNCIAENFEARLLKYLSYLIQNTFVSMAYQDVKKIAYDYCYQSVCKGEPKWPQGAIFTQETKAAVDEACLPSQQLITTRVTLKELSASPSTFLPCILYILSKYEEEHKEHHAYDVRRLPLPRLFSVLPNPSLHWRFINISANSLSAFVKEPLPRGYNDQLRMFCRVFNFKKLRINSIDDLLPNQNNKIMFANTVKSDGFSVDFVFNKRTTKDTSLIANIDLKLEDFGLEEVKQAYQPMFLDPGRKSVFTAAIGLDTTNHQIRRCSTAELKAQKGIRTIETNIPSPKTSQCAAYLLYIEYILTHVGVLFTSYDYKTAKDRFYLYQGRQRAAEEMVNMLVHGGAKSQKWKPAKFQTEREKVPLVVFGAGMFGKDSIKLKRNRCGATGVFWRALKRREAAGDLIAVTIDEYKTSKVCNACNSDSLTGMPGLKGCSIQVCSICKTLWQRDINACKNMLSISLSIWDGRGRPFQYSRN

SEQ ID NO: 4674 - protein, 239 aa, Rhizopus microsporus
MFLDPRRKSVFTAAIGLGKVKHKIRRCSTAEYYDMTKSTKHLKKLENLKVEKGIKEIETNIPSPKTSQCAANLLYIDYILTHVGTLFVFYDYKTAKDRFYLYQGRQRAAEETVNMLVHGGTKSQKWKPAKFQMEREKVPLVVFGAGIFGKDSIKLKGNRCSVTGVFWRALKRREAAGDLIAVTIDEYKTSKVCNACSNDPLARMSELKGCSFLVCNTCKTLWQQDVNACKNMLSISLSI

SEQ ID NO: 4675 - protein, 755 aa, Rhizopus microsporus
MWKNYAEEQFDNITYRVKKESGKETMEQYEPSVSVPEEVPIRPFSTSLLPLLRSDLSVDIRDAFLDTINQAMASVSDYIIANDIQIWLLNRVITVLLRIHLPPKCERLKREKKSKRPAESPNGSFKMPYNRRRKLFRNENIKCEEYLQKAQNDKLNENRWLPKVQKSDMDIAKYKKSLQKERTTVNPRATLPAMSEDDEADALEITADIHLIAAQEVAKNEPFKNYHMTSNFQAIWSQGKRKIYEDALSDIKPDELHVCVLITNFLLPYLPSGDKLQHIMHQLSFFLMANDLFRCCGYTHFMVKLVPLTTPHKLLAFKLDASSLYAMFCSKNDEMEIFDFDYLQTKSRQVATDLTFAHNMLVLPGLRTARVNGYLKNQTSVDSLTSLQERHIKRKRGFIEHEQSKTKQQLSDAKQSMYSGVVRATPDEIAHQHKRIITRNDYKIMDEIEKLKVDKDFLISDKLKFSGTDNGLITMTETVSFRLQDSDFIWIYTTRFHFEVVFLKFEKPFKVKSEQVGYGSRAQKLRLQLQRAKKANAQRITSVENAASRKSIKKDESVARLEEWYQQAVRHRKQLRDFYYPPTTVRQKRTYELQRRRYIDKLCSSEHQYVTSSDKSQYIMFVGDRGYRVGSTIKGNLKYGGQWKPRKNSLYTSVCITNEHNTSQTHLFCFKELQYPLRVTGNTKLKAVNGTFQCVNPDFPSVLAGKAIHARDNISAMAIGLSGLTTLLFGAIFPQFDPKYSLSKTAEFEYLSATF

SEQ ID NO: 4676 - protein, 357 aa, Rhizopus microsporus
MSFQIFYEDGHGNAADEYGRPEPMDYNIDEERYALETVSSHTQYLHNQPQENNFVVASMADEDAKNDPDVCMKEASSKRAYTLYTDQDKHKKTGRSRILQEHKQVILEYIDESPLAALEQVMERLLQKFQDLKASKSTVYNFSAFHINLKRSMAWSKKGLHAAVTVPKTRAQTTTILGTISASELIKYSLRLPQPSAKKRKREGYVELTSTGTVTGHYFSFLKAMMDEIDQYPHMKCLFYGHTIKNHDNGYPPFRKVRLSAYFNKQRADQKLIQDLRAKFREDSVFMMGNWSAPHARYHEPIRGLGFRRLLKKHGFQVYLIDESKTSKCCPTCHNESLRTLRRVPNPRPFKMHQPIL

SEQ ID NO: 4677 - protein, 1782 aa, Rhizopus microsporus
MQNKKQDEAKDEAKLQSVFCPPLDSSLVTAIWNDTFNYDTSYEILSALAKEADQALDLQLSVEQLQLLDMDESCSTSATATTENDDDNVAFLLNCFPTHSVEELKDALMSQDNDVEKATDLLLNREFLQQAEDDDKRARAILNKKKRKKKKIIISGQLPHASSHSNNNNNNNNKDDPYEELETVPFNHWKQYDDIAKVLQPYFPNMPKFLITTCVQRCRGNVIASVKAIMEKAPDEKPEHVLNWESMKDLISLKKELEPLMVDRSAEEVHRVAVGTIIHYQGQGKTVEQLVQSAMEHFLTFDISQLDLEARLEKMAKESDMLRAKAKQRGIPIIPEYLLLNNQTNYVEDDPDECRNIAMELIIERNELYRKAAAAYRKARNKGPEGGVALYYSDVAREIDSKARDWNMRAARATVRRERLRQNDDHLLDLHGLTIAEARVVLKEGVTQWWSRSQMQSESTITNHDNGHPLFRKARLSAYFNKQRAEQKLIQDLRAKFGEDAVFVMGNWSAPHARYHEPIRGLGFRRLFVVFSFVIPLQNTLSFLKTGNNSNISLETPRSRSGSILRAISLHSNSSRYEDEESTSCNPEDFVIKNPIGYGSSAVVYNAIYKPKNMRVAIKMIDLDLFERNQIEELRRETALMALCKHPNLLKVYGSFVNGSKLYIATPYLSGGSCLDIMKSGFRDGFEEITIATILKQALEGLIYLHKNGHIHRDVKAGNLLMDDQGTVLLADFGVSSSLTENSEIRKTFVGTPCWMAPEVMEQSGYNFKADIWSFGITAIELATGHAPFAKFPPMKVLMMTLNQSPPTLNRDQTKYKYSRTFKEMIDCCLQKDPNKRPTAEKLIQHSFFKQAKKKDYLVKSVLACVPPLDERPHKRIAFKQTTIENSDQWDFDDTSPHEKSRHITFGNVIKNTDKAIGLPSPAPSEPEIGSPSFHRRSRFVIDDYTHPSDTTTTTTATTTTSTSAGPHRSISPNQYTPQPGNSSPMSSSPPQTCDSNSWQSSVGLGLGISHQQENSEIKKGRFSVNQASVPKPENLPFLATDPSQDIRPIPMSRALSNESTRDGRKSRFEIQHLSPQSSGTTTLGTTPPYTQDIRTEPLTRESSSYHQRSSSSSSSKIGRFSIEKEHTADMVHPHETSVQECRKKGRFELTGAPLPSERFESFAPTQQPGMQHHVETLLKQLEIQKTILFDILHTIPNRSRSPSIDIRKLSNSSLDNNAESYFQHKPIAARMTQPSTHNDITLHNQPPDTISFNTDATEQTTIVPNSQPVDVSNIPLPKDNYQRYLSVQNHNIVIPSYAAWFDISQVNTIERRALPEFFNNRNKTKTPTVYKEYRDFMINTYRMNPVEYLTITACRRNLTGDVCAILRVHAFLEQWGLINYQVDPDAKPSSVSPPFDSQFKVVVVDEVKKEEIPTDIKQEEQIENQKMSIVDIEKGKIPQTCVSCQKTCTEEQYCSTTRDNFFLCRHCYIEGNYPADLKGSEFIYFILEEENNIDQWTEEEESLFKEGCEQFGDNWEKVSEHVKTRTHDECILHYLQLPSKDPVDTLKLTDLGLLQYDLNQRNANPVMSVVAFLSSTVDPKVAAAAGQIEPEVTIEEKDTKTTEDDKPSQEEEEALYDLSHRLIGAKLSRFNQQISRYEALEKAVEEQKEVLEKERHQLEHESFSFKRKLMQIQVEMAKRTKLTATTATAAAAAAMNSITPAQLQQQLAVGNMNMFMNQQSPQLLQQQYQLQMQMQMQLQMQQQQLHLQQQQQQQQHQQQQQQQQHRGRPTGQGINTNMMSF

SEQ ID NO: 4678 - protein, 455 aa, Rhizopus microsporus
MARLFNIMMLKYALSVLWQRTYFQDFIPKKEKQLAESPTESFKLPYNRRKNLFRNENIKREKYLQKAQNNKLNKWLSKVQKSDMRIAKYSELLYKERTTVNPGTKLPAISNDDELATLDIAADIHPIASQEVTALEDEAIEIKTKQQLLGARQSIYSGVVRATRDEITHQNKCTITRDDYKIMDEIEKLKVDRDFLISGKLKSPGADSSLIAMIEMVPFSLSRLKFHLGLYNKTNRLRQWVTGASITTPKSEENKCTRITSVENAVSRKVSKKTKEFLDLKSDINKPQECTCDLQRRRYIDKLCSNERRYVISSDNSQHIMFIGDKGYCVDSTIKGHLKYEDQWKSRKNSLYTSVCITNEHNTSQTCLFCFKKLQHPLRVTGNVKLKIVSGTFQCINLECTSVLADMATHARDSLSAMAIDLSGLATLLFGATFLQFDPKLQNLNIPPLLSEKET

SEQ ID NO: 4679 - protein, 949 aa, Rhizopus microsporus
MQKPKKGPKQYQESKGKLDGRDVFIKEIPLKDLDDDWNKGMEMFEDSDKYVHKPCTTLVYDNKALIITNHSERYSLFDFLKHRKLKFLECLKLAEPIISGLIYLHCHNLVYCSLTSSSIILDENNTPKFRGAGLIKVGSNHAASKPASEDAFRWMAPEVLKGDPPSFKSDIFSLGIILWEILVDEAYPYKEAKDAALIKECVLGGYRDLFPPDTLPSYRKLIENCWQHDPNDRPDSIGLLGFIHAVKHDMKKQLGEVEEASIPNIIKHPGKLNHKDPADNLFDVAKYCFKMGEYGKARTWYEMAAEKGSASAAYEVAQMYMYGIGVEQDYDEAKKRYETAASIGSVDAVYAIGLMYNYDCGVEQNYQKAIEYYQQAGNKGSAMALYRIAEIYFYGDGVERDDQKTLEYLNRASKMGLPCAIELTGYMYAYGRGVEQNDSKALSCYYKAAREGCAWGMISLGNMYYDGTFVCQDYEEAMEWYQKAIDKSKSNDLXTVSLRTQYLHNQGQENNFDVGSIADEDAENDVDVCMNEASNKRAYTLYTDQDKVRFFKLMLEKAMSASAAAKQSDIHVRTAQRWAQMYKTDPDNENPSAVLEQVMERLLQKFQDLKVSKSTVYNFVRTECNLSLKTSWEFNGLILLINLTNGAELSTLIQKLSSRKKADNLDSVALFKLMALVSQFSRRGSIGKQVEITKRFLIDASLWTQEEEICSEQTLSQQPSSTVFVEGFSRFLQARSEQSTVLSRFYGHTITNHDNGYLLFRKACLSAYFNKQRANQKPIQNLGAKFGEGAMFVMGNWSAPHARYHEPIRGLGFRRLLKKHGFQVYLIDEYKTSRCCPTCHNESLRTFRRVPNPRPYQRERYSTVVCHGLLRCTNLYCRPTMAALDRYRLWNRDVAVCLNYLHILRGLRLNGMVPHRLRRIAVASTRRRRRVDDQEQPRTRIRLDDDSSS

SEQ ID NO: 4680 - protein, 533 aa, Rhizopus microsporus
MDEVSTPSSFYSSAMSTSSFLAPGDRILAVKSSVDGIGWNDLYRETLESFVERVHIITMHVYSFSKFIFLRESMALIGYRELINRHLDDYLTITNYQRPNFVFAQQSVIIEGTKVYTVYVNNAHLRFGQHLRRAVNALLRIRQRTADLRRDLSAQGMDDDEIKHRIRQDISLPAQTFKQAISQQPIDMKQVPQEPIYMEALITLRPVFDAYDRDYNFDEQRLYYNVKRNPVNHFKAFYQLSRLFILCQSILGIKWSNAVDKLDYWHRVVNLDSKALKPQEGVQLRFRGTIQTDGVDVTVFKKRFDRQTRYTARLPVKYEATSYITNVTRRNHQGVSGRCVAVDPGRRGMLYFVHENSTPEQLVKFRYTKQQQDKTWKTKKYRRILQALEAQDPDIVRAESEQSAVLSRFYGHTITNHDNGYPLFRKIRLSAYFNRQRADQKLIQDLRARFGEDAVFVMGNWSAPHARYHEPIRGLGFRRLLKKHEFQVYLIDEYRTSRCCPTCLNESLHTFRRVPNPRPYQRERILLLSAMAF

SEQ ID NO: 4681 - protein, 293 aa, Rhizopus microsporus
MWHIRSYNPIFVALQEVDNSDNPFFHFDLLHQQSVRHQSLWAQYYGLVCFDPSFSITRIPIPEGILCLLAQVTHINDFIEPFFILAIYAPQRVKFRYIKQQQDKTWKTKKYRRILQDLKAHEPDVMQAEQALSQQPSSTVSIERFCRIILPLLTNLRVRLLHYYTVYSHSTFSITFDHVLQARSKYSAVLSKFYGHTITNHDNGYFLFRKVRLSAYFNKQRADQKLIQDLRAKFGEDAVFVMGNWFAPHARYHEPIRGFGFRRLLKKHGFQIYLVDEYKTSRAIVLSKAPDSS

SEQ ID NO: 4682 - protein, 536 aa, Rhizopus microsporus
MKAQLFVNYFILKHPNKLTNDFFEQNFWYTISKIVRAGPDKIKSILEDYRNRRKERSDEENLDVDQLTNAFVFLSSTTTNGSLFVEENGLKNYGQSLSAACETVALSYNNYYIENFENIICNYFIYILKRKYPNVRVGCLKNLVYNHVYDEVLVRCEPSSIPDEMLGRFDSDVASSLSSFLNPLILEMKSRMPMLPVSKVSLNNGPFKILPALRHILEKYENLHMAQPSPIDKDNASKLVPPRLFSIFPEAKQEKQINESPFDHNQRQFFQMFDFKKLGFRSWEELKNMPEQRGRMFLNGMYTDDYTCSVLFCRKVLLSSVADGVSLELSDFTTDEVDTYFRPCTVGPGRKDAFVSYHGGTDIRRLSSAEYYSMSGTVSRQKVQQGRKQNLGIESIKTNIPSPKTASTQRYMLYITYILQHMDSLFNFYNFETTKLKWLNYIGSQEVIQESNKTHFEEGDRKKMPLVIFGDGLKNKGHIKFNGLRRGVSNKIYRQLKRREGLGELLLLDINEFKTSKVNLQLLLKPRPSESKMWRR

SEQ ID NO: 4683 - protein, 445 aa, Rhizopus microsporus
MSRIPIYPEVEKFIALKRRIKIENTQSNDNSDDLPAQNSRRTGTKRKDTSDTIKAKKGVKRRRQAATSEAPSSTKMKNRMPTLPVSKVSLNNGPFKILPVLRHILEQYENLHMAQPSPIDKDNASKFVPPRLFSLFPNPGLGWRFIKVDAQNLTGILPEAKQEKQINESPFDHNQRQFFQMFDFKKLGFRSWEELKNMPEQRGRMFLNGMYTDDYTCSVLFCRKVLLSSVAYGVSLELSDFTTDEVDKYFRPCTVDPGRKDAFVSYHGGTDIRRLSSAEYYSMSGTVNRQKAQQGRKQSLGIESIETNIPSPKTASTQRYMLYITYILQHMDSLFNFYNFETTKLKWLNYIGSQEVIQESNKTRFEEGDRKKKPLVIFDDGLKNKGHIKFKGLRRGVSNKIYRQLKRREGLGELLLLDINEFKTSKANLQLLLKPRPSESKMWRR

SEQ ID NO: 4684 - protein, 1189 aa, Rhizopus microsporus
MVNAWELIQKKTFTKWVNNKLDVKNIPNIVHLNEDLANGVRLIQLLEIIGGESLRPYNQHPTMIFQKMENVNKALDFIKSRGVALTNIGAEDIVNKNLKLVLGMLWTIILRFTIADINQDGKNAKEGLLLWCQRKTASYEEVDVQDFTYSWTDGLALCALIHHHHPELIDWDALDKTDRHGNTALAFEIAEKNFNIPKLLDVEDLCDISKPDERSVMTYVAEYFHAFSALDEFETAGRRVAKFADVLASVWEMKHHYEERVIALMEAVDLMQEEWESTELTDSYTDAKEKSTNFAIYKSTQKRAWLAEKRDIDALLGNIQTKAKTYNLRPYYPPNGLTLKDLDDCWSRLLQNEARYHRRINSTIRQIKEGLRKAFAEAANDFQEQLDTISAKLVNLEGSLQSQLRIVQNLTNLFEPLQESLDIIEMLDQECIEANTEENDYTVYSFEDLRFGLDLVKEAVQKKSAFIQNQIISRNMTNLTPVQLEEFEQTFRYFDKDNTNTLSVSEFKYALSSLGIVYDNDKLENIFYTITNDNDFATFEQFIRFMVSVTEDKSTPDQIRESFRTMAGDKPYVTELDLKMSQIPMKMIDYLKRTMPNSEDNAEGYDYELYIEQIREPKTPKDFADIADDAEIWDVDPGISTIFTAVDSTGHACIRTTNLEEYYHLCGYSLATRRRKEYQECHLDEFKYQKFKLYIKKQKEAQEIVKSLFDRSNPNKIKHVPLPPDDLPSSFQQKRIIAFGNGSFSSSMKGKRAATTRRITEEIKRKCKQSEFVSVDGYLTSQICNKCKANQLNNTSIAGSKRRVHSVLKCESCGTVWNHDVNSALNVYGIFVYKSKHDNESPLSFKRPTLFPGFNALSITAVHSLTPRYISFCFIKLNFNLRKLKLGKTYYNPPTLFRAPVSVRKMVKILQDPAIFASVAAITVVGSLGTWFYYFRKRPTRVLDQHTTKEFKLQAITPTSHNTSIYRFSLPRQNDVLGLPIGQHIVLTANINGKEVSRSYTPITSDEEKGYFELLIKNYPNGTLTRHISKMKVGDRIGVRGPKGAFIYSPNMVKEIGMVAGGTGITPMLQIIKAILRNPADKTKISLIFGNVTKSDILLEEELQGLVEQHPDRFNVYHVLNEPPENWNQGVGFITKDILEQRLPKPSNDVKILVCGPPPMVKAVTNATTDLGYEPPRTVSKLTDQVFKF

SEQ ID NO: 4685 - protein, 304 aa, Rhizopus microsporus
MFKKTAVVQDETRREPKTPKDFADIVDDAEIWDVDPGISTIFTVVDSTEHERIRTTSLEEYYYLYGYNLATRRRKEHQEYHLDEFKYISELPTLKTANLTSFLLAASTRLHNYQRIHDYYCQGKWYAALLYGTYFNNAVLFDNSKKYDKSSTVGAKNQNPNKIKHVPLPPTDLPYSSQRKRIIAFGNGSFSSSMKGKRAAPTRRITEEIKRKCKQSNGEAKFAYVDEYLTSQICNKCKTNQLNNISIAGSKRRVHSVLKCESCGAVWNRDVNSALNIYGIFAYKSKHGNESPPPLQKTNDVPWI

SEQ ID NO: 4686 - protein, 629 aa, Rhizopus microsporus
MRKKFSDQLRKCCLTGSRYYTVFLLTIEAEDLLEDAVDEDEEEESIDLTSSRGWTAGEVYMDSRLSGSAEGFTFLNSRLMMNNGRCASPLDYFLFFLPVDHFYSIIHNTNFHARSLGHWEDITFHEYLMWIALLTVITVVRHNNRKAYWRQDQSFFLMDIDYSQYMSFNRFNDIMNMYIFEIPSKQAQELDPLYQIRSTIQAFVSSCGATRLTSEKTFKSFDGNLVTIKWPEVVDEYERHKSRVFSEEGASRGHSSFKDNLAFNVLEHSVDHGFPSLFSQTQTNLFKNTSFEASDDDFQETPLLRKGKNVHTILKAAKEGTSAPGPSDVVINENASMPVVNKDTSAQAVSPAPIPYTSCTSAPTKASKKYQSKVDKTEVLKKEKEKNKVTGNEQKQSKTKPPKPKDTVEKTFVIKTSLANTCRYPKFVTLEEYYNLCGYNLATRRRKEHQEYHLDEFNCPYTSTKLSKNSQLLLSRSQKLKFKTYINKQKGTQEIVKRLFDNSKNKHVPLPPADLPSFSQRKRNIAFGIDSFFSSMKGKRPAPINEGTEFVSVDEYLTSQICNKCKPRQLNNTSIAGSKRRVHSILKCESCGTVWNRDVNSVLNIYGIFVYKSKHDNENPPPSKRPSKD

SEQ ID NO: 4687 - protein, 381 aa, Rhizopus microsporus
MKRRKDDDPPPPKAKCNKEKAVDHGFPSLFSQTQTNLFKNTSFEASDDDFQETPLLRKGKNVHTILKAAKEGTSAPGPSDVVINENASMPVVNKDTSAQAVSPAPIPYTSCTSAPTKASKKYQSKVDKTEVLKKEKEKNKVTGNEQKQSKTKPPKPKDTVEKTFVIKTSLANTCRYPKFVTLEEYYNLCGYNLATRRRKEHQEYHLDEFNCPYTSTKLSKNSQLLLSRSQKLKFKTYINKQKGTQEIVKRLFDNSKNKHVPLPPADLPSFSQRKRNIAFGIDSFFSSMKGKRPAPINEGTEFVSVDEYLTSQICNKCKPRQLNNTSIAGSKRRVHSILKCESCGTVWNRDVNSVLNIYGIFVYKSKHDNENPPPSKRPSKD

SEQ ID NO: 4688 - protein, 237 aa, Rhizopus microsporus
MLPSSVTDHVSLELSNFTSDEVDKYFRSCTVGPGRKGAFVLYHGGTDVRRLSSAEYYGMGGAVKRQNLQQDYRKAKMAKFYWAPNGHSRKRKSAVVQEELTRTSYPTIRKRKNKNRFKDLRQSVSNKIYRQLKHREGLRELLLFDTNEYKTSKACNFCSNQRLQNLKREEGDDSKKIHQVLKCNTCNIFWNRDVMAFRNILLIARSTWNGQDRSNVFKRQLVTSNVIASSHSGGALT

SEQ ID NO: 4689 - protein, 384 aa, Rhizopus microsporus
MNFQVFYEDRHGNVVDKYGRSKSMDYIIDEEQYALETVGSYAQYLHSQPQEDSSDVDSMEDEDAKDDIDVCMKEASSKRAYALYTDQGKVRFFKLVFEKVMSASAAAKQLDIHHKKTGRSCILHEEHKQVILKYIDENPSAVLEQVMERLLQKFQDLKVSKSTVYNFSAFHINLKRSMVWSKKGLPAVATVPKTRAQTTTILGAISASELIKSYSRLTRQVWRRYRVCDGNWSAPHARYHKHIHGLGFRRHLKKHGFQIFFIDEYKASRCCPTRLNESLHTFRRIPNPRPYQREQHSTVVCHGLLRCTNLYYRPVMTASDGYRLWNRDVAACLICMHILRGFRRNSMVSHRFRRAAVAPARCRRRVDDQEQSRTRVRLNDDSPS

SEQ ID NO: 4690 - protein, 371 aa, Rhizopus microsporus
MIHANYFGIQDVTEETLKKHSFQTALRQALNEDGRKSESTDPVVMKLALNRYISNFKNMWFQKMRSRKILNRVLIVLLRVHLAPKRERSLFILSLLDLRIDDEVIIDIAADTNPTAAEIPGFKLPQKKQRSSSLQSLAKYTRPTLPKVISEIEAKLSVYSFQEIHSIEELNKWYDGRITHQDVLRDYYYSQQKVRQLRAYELQKRKYINRLCSQERSYVTSSSKKPLTMFIGDSGLCFGSSIKGYQRYGGYWKPIKHSLYTMACITSEYNTSQTCIFCFKKLLHPKCSTTDKNDRINLKNVNGAFVCVNPSYPSVKAGQNTHARDTLSAVAIGLSGIATLLLGTTFPQFNQPAAAFCTGNAVRPITTGYNT

SEQ ID NO: 4691 - protein, 422 aa, Rhizopus microsporus
MSFQIFYEDGHDNVVGEYGRPEPMEYIIDEERYTLETVRLHTQYLHNKPQENNFDVSSMVDEDAKDDPDVCMKEASSKRAYTLYTDQGKVRFFKLMFKKVMSASAAAKQLGIHHKKTGRSRILQEHKQVILEYIDENPLAALEQKRFDRQTRYTARFTVEYEATSYITNLTRRSHQKISGRCIAVGPGKRDMLYPQGKPWKTKKYRRILQDLKVQNPDVAQAEQTLSQQPSSTVSVEDSGRFLQARPEQFAALSRFYGHTITNHDNGYPLFRKIRLSAYVNKQRADQKLTQGLHAKFGEDTVFVMGNWSAPHTRYHEPIRGLDEYKTSRCCPTCHNESLHTFRRVPNPRPYQRERYSTVVCHGLLRCTNLYCKLAMAAPDRYHLWNRDVAACLNYMHILRRLRRNDMVPHKLRRVAVAPARR

SEQ ID NO: 4692 - protein, 494 aa, Rhizopus microsporus
MSFQIVYEDGHSNAVDAYGRPEPMDYIIDEERYALKTVSLHAQYLHNQPQENNFVVTPMTDENAKDDPDVRMNGASSKRVYKLYTDQDKVRFFKLMLEKVMSVSAAAQQLGIHVRAAQRWAQMYKTDPNSIFIKHKKTGRSRILQEEHKRVILEYIDEDPSVVMEQVIERLLQKFQDLKVSKSTVYNFVHKWECTDMNFRTNRIFLDESAFHINLKRSMAWPKKGLPAVVTVPKTRSQTTTILGAISASGLIKCSLRLPQPSAKKRKREAEQALSQQPSSTVSVEDFGRFLQARSEQSAVLSRFYGHTITNHDNGYPLFRKVRLSAYFNSQCADQKLIQDLRAKFGEDAVFVMGNWSAPHARYHEPIRGLGFRRLLKKHGFQVYLIDYLRTFRRVPNPRPYQRERYPTVACHGLLRCTNLYCRPAMAAPDRYRLWNRDVAACLNYVHILRGLRRNGMVPHRFRRVAVAPTRRRRRVDNQEQPRTRIRLDDDSPS

SEQ ID NO: 4693 - protein, 407 aa, Rhizopus microsporus
MYKKNRGVRRALVIEAILAELPLHQSIRKPVACVLQEEHKQVILEYIDENPSVALEQVMKRLLQKFQDLKISKSTVYNFVRTEYNLSLKKAQFQPVDRSSEEKIQERFDWVHKWKCTDMDFRTNRVLLDESPEITADASQEKKEGYVELTSTGAATGHYSSFLKVTMDEMDQCPHIKWYYLVMDSAPSSTVPVEGFDHFLQARSEQFAVISVFYRHTITNHDNGYPLFRKAHLRAKFGEDAVFVMGSWSDLHARYHEPIRGHGFRRLLKKHGLQVYLIDEYKTSRYCPTCHNESLHTFRRVPNPRPYQRERYPTVVYHGLLRCTNLYCRPAMAAPDRYRLWNRDVAACLNYMHILRGLRRNVMVPHRFHRVTVAPIRRRRRVDDQEQPRTRIRLDDDSPSQLSLGHI

SEQ ID NO: 4694 - protein, 259 aa, Rhizopus microsporus
MDFRTNCVFLDESAFHINLKRSMAWSKKGLHAAVTVPKTRAQTTTILGAISASELIKYSLRLPQPSAKKRKREGYVELTSTGTVTGHYFSFLKAMMDEIDQYPHMKCLFYGHTIKNHDNGYPPFRKVRLSAYFNKQRADQKLIQDLRAKFREDAVFMMGNWSAPHARYHESIRGLGFRRLLKKHGFQVYLIDECTNLYCRPAMAAPDRYRFWNRDVAAGLNYMHILREIRHNGMVPHRFRRVAVAPTRRRRRVDHNSLS

SEQ ID NO: 4695 - protein, 452 aa, Rhizopus microsporus
MHRQVIQPQENNFDVGSMADEDAKDDIDVCMKEASSKREYTLYTDQDNARFFKLTFVKVMSASAAAKQLGIHVYTAQRWAQMYKTDPHSIFIKYKKTGRSCILHEEHKQVILEYIGENPSATLEQVMERLLQKLQNLRSLKTLSTIFMAWSKKGLPAVVTVPKTRAQTTTILGAISASGLIKYSLRLPQPPAKKRKREGYVELTSTGTDSDVVQAEQALSQQPSSAVSVERFGRFLQARSEQSAVLGHFYGHTTTNHDDGYPLFRKIRLSAYVNKQRADQKLIQDLRAKFGEGAVLVMGNWFAPHVRYHEPIRDLDFRRLLKKRGFQVFLIDEYKASRCCPACHSESRHMFRRVPNPQPYQRERYSTVVCHGFLRCTNLYCRPAMTTPDRYRLWNRDVAACLNYLHILRGLRLNGMVPHRFHGVTVAPTRRRRRADGQEQPRTRRRTDDSPS

SEQ ID NO: 4696 - protein, 1045 aa, Rhizopus microsporus
MHNYISTVILNKIRHSKKLEADLLKAKNDLSNKTRLPPGIMTNAASFADLETNVMRNFMENNGQKLMIELWKDYVNEHFDSIAKTLRDRNLSFKKEEPSSSLIQSGSSGINVEEQYRTFSISVNKALRKELPENIENVVKTKIETSLENSSDFCAQFLFIINAMSIVIKSDGKIIPKKSTEFDMLQVLPFEFVQKNGVQPVLSSLPLPHNMPDEYRRELEVLFTEQHLSLIQSHFFGSGAQQKNLEKHPVEDFLFKELASNGITKDSYNTMLTTEEMKVALARIVTNIKNMWSTNDIFKKLLDRLLDVLLRLHLAGARTSKYNSYVARKAKNKYTVDDSFLSSNSQRNLISTEYKKKRKREQKLQMITDKEKQAKHSVASSSTDKVEHDEESNSDNANTDEPSRSRLKGLKSVTKHLLLSSGETITVEDIKRDMTDATEKEISTMSLLIQKLKPYIPAKQNRFVIGYQIPFCLLANDILHVTGNKKFTRLLFPQPRPSQLQALKINATSIYQMLTSEPNPLSIADFDNNKIDSIEYARSNKDAVFCSIFDMAQIKKTCESYNLTFAQNIKILPAGVVAAEKPIDHLSRILNYPAVINESKKNPSDLQCEIDTLQHNVNNLKDSLRTLLKSDLVTKLTAEIKTIKVELMSEHKDGVITKLNATKKKRRDAYLAIQKCRSSKSALNQELYYKRMAMRYKSQIAKKEEVTSTSSTKEEKEDSFFKLTNETRGVYEVTKCRLVESPEDFVFSGTDNGIINMSTTTAFNFDRYKFHLKLYNRYQILKETNIDLQVNKDYLNLPPQQKKLERAKKYTTDGKEISKVEVILSEAPITTTNSYISEYQASFNLHVGYSGQLRRFYSSKKRVNLQRAEEIQKSRFLNSIIDKERREIVSKRDWDKLVQFIGDRGTGVGTRIKGHRRYGGRWLEIMRGKRGNVCITSEYKTSQTCVYCFEQLEHPQFIEQKNGKMIKKLTKGSLMCINTECVSVKHGRSTKSRDALSSLAIGLSGLISCVLGVPIPHFSPNQISQYNTENFETQASALLEEEKNS

SEQ ID NO: 4697 - protein, 391 aa, Rhizopus microsporus
MAQPSQIDKDSASKPVPPRLFSLFPNPGLGWRFIKVDAQNLTGIFPEAKHEKQINESPFDHNQRQFFHMFDFKKLGFRSWEELKNIPEQRGRMLLNGMYTDGYTCRLLFCRKVLPASAADDVSLELNDFTTDEIEEYFRPCTVGPGRKDAFVSYHGGTDVRRLSSAEYYGIESIETNMPASKTASIQRHMTYLNYILRHVDILLNFYNFETAKLKWLNYVGSQKVIQESVNILLNGGKKKKARRSAVANEEHPLPIPRSESRKNKNRFEEGDCLRHGVSNRIYRQLKHREGLGELLLLDINKFKTSKTCNSCLSQELQNLKCGEGDNVKKIHQVLKCNTCNIFWNCDVMAAKNMLLIAHCVWNGQDRPNVFKRQFTTSNVAASFHSGGALA

SEQ ID NO: 4698 - protein, 633 aa, Rhizopus microsporus
MNRKKGDDPPPPKAKLNKGRAVDCGFPSLFAQTQTHLFKNTAFGANDDDFQETSLLGKDKNIRTTSKVSTKDISTLGSSNAVTSEKISMTAVNKDTSAEAVLPAPIPSISCTFTPIKTSKKYKDKADKTEALKKRKEGIRRQIMSKNKYPKFVTLIQEVVDHITQPVYDGPIFANHYFLKLLKNGEGLPVITQNLFYNIFSIFAGQGKHTSDSIKSFKAFCESTSLTPSELDKYANKRYVIIISSMTKQYETLVRNYVCSTYENRAIRHILNVLSEKASYFCGNSLTVKQRKSLAKRVFQQKINLKSAWPSIVSRVERHEAIVNNFLTFWSTYNASNDADVSSEADLYAKPQCYMKWLHFIQKKLQELPFTLEKTSKLRNIDKKDIDAVQAFIKTVQARIQDKTFMPFKYIDPRGLRYFSLLPLYKIDSQSFWKLAKQRDNKIKPGQKNDNDLKLWYFNVFDFSKISYKTLESLTLRPKKSAIWNVDPDILTIFTAADSTEHEHIRTTSLEEYYHLCGYNLAIRRRKEHQKCHLDEFKSQKLKFKTYINKQKGTQEIVKRLFDNSKKYGTSSTVGAKSQILVKSKHIPLPPADLPSSSQRKRIIAFENGSFGSSMKGKRAAPIRRITEEIKRK

SEQ ID NO: 4699 - protein, 426 aa, Rhizopus microsporus
MSFQIFYEGVHSNAVDEYGRPEPMDYIIDEERYALETVSSHTQHLHNKPQENNIDVGSMADEDAKDDPDVCMKEASSKRAYTLYTDQDKHKKTGRSRILHEEHKQVILEYIDENPSAVLEQVMERLLQKLQDLKVSKSTVYNFVRTESLEPQEDGQLRFRSTIQTDSVGVTIFKKRLDRQTRYTARFTVEYEATSYITNLTGRNYQEISGRCVAVDPGRRDVLYFVRENSTPEQPVQFQYTKQQQDKTWKTKKYRRILQGFKAQDPDVVQAEQALSQQPSSTISLIQDLRAKFGEDAMFVMGNWPAPHARYHEPIRGLDEYKTSRCCPTCRNESLRTFRRVPNPRPYQRERYSTVVCHGLLRCTNLYCRSAMAAPDRYRLWNKDVAACFNYMYTLRGLRRNGMVPHRFHRAAVVPTRRRRRVDDQE

SEQ ID NO: 4700 - protein, 401 aa, Rhizopus microsporus
MADDPDVCMKEALSKRAYTLYTDQDKVRFFKLMFEKVMSASAAAKQLDIHVHTAQRWAQMYKTDPDSYVDENPSAVLEQVMERLLQNFQDLKVSKSTVYNFVRTEYNLSLKKAQFQPVDRNSEEKIQECFDWVRKWGRTDMDFRTNCVFLDESAFHINLKRSMACFLKAMMDEMDQCPHMKGYYLAMDSTSAVLSRFYGYTTTNHDNGYPLFRKLPLSAYFNEQRADQKLIQDLHTKFGEDAVFVIGSWSVPHARYHEPIRGLGFRRLLKKHRFQVYLIDKYKASRCCPTCHNESLHTFRRVPNPRLYQRERYPTVVCHGLLRCTNLYCRPDMAAPDRYRLWNKDVTAYLNYVHILRGLRRNGMVPHRFRRVAVAPTRCRRRVDDQEQPRTRIRLDDDSPS

SEQ ID NO: 4701 - protein, 249 aa, Rhizopus microsporus
MARLFSLFPVPSLKWRSVSINPNMLSSFAGKPKQSNYEDKFNMFHTVFDLSSLGVNRSDGFAADVVLYKGVNNNEDKSLDSGILQLHWVHSSPKKRTEKNGEGRNEKRIAGHPFDQDYIFDAISYVTYIMANIQKILDFYGYETAEGRFHCYQGGRRAREEMVNILINGGPKSSGGHKKFICNSCENMAFTSAFINFHGIQSCAGCGLLWQRDINGSKNIFKIANGIFRECGRPQAFCRRIEHGSPSGV

SEQ ID NO: 4702 - protein, 507 aa, Rhizopus microsporus
MDYIIDEERYALETVSSHTQYLHDQPQENNFDVGSVADENAKDDPDACMKEASSKRVYTLYTDKGKVIFFKLMFENVMNALAAAKQLGIHVHTAQRWAQMYKTYTDSIFIKHKITGRSRILHEEYKQVILEYIDESPSAALEQVMEPLLQKFQDLKVSKSTIYNFVRTEFVNLDSKALKPQEGGQLRFRGTIQTDGVGVTVLKKGFDRQTRYTARLTVEYKATSYITNLTRRNHQEISGRSVAVGPGRRDMLYFVYEKSTSEQPVKFRYTKQQPDKTWKTKKYRRILQDIKAQDHDVVQAEQALSQQPSSAVSVERFGRFLQARSEQSAVLSRFYGHTITNHDNGYPLFRKSKYHSADQKLIQDLRAKFREDAVLVMENWSAPMLVTMNLSVALYKTSRYCPACHNGSLHTFRRVPNPRLYQRERYSTVVCHGLLRSAMAAPDRYRLWNRDVAACLNYIHILRGLRRNGMVPHRFRRVAVAPTRRRRRVDDQEQPRTRIRLDDDSPS

SEQ ID NO: 4703 - protein, 378 aa, Rhizopus microsporus
MYKTDPDSIFIKHQKTGRSRILHEEHKISRPVKVLSTILDNEEKIQERFDWVRKWECTSMDFRTNCVFLNEPAFHINLKRSIARSKKGLLAVVTAPKARAQTTTILGTTSALGLIKYSLRLPQSSAKRRKREGYVELTSQDPAVVQAEQALSHQPSSTVSVEDFGRFLQARSEQSAVLSRFYGHTITNHDNGYPLFRKIRISAYFNKQRADQKLIQDLRAKFGEDAVFMMGNWFTPHARYHEHIRCLGFRKLFKKHGFQVFLIDGYKTSRCCPTCHNESLQMLRRIPNPRPYQHERYPAVVCHGHLRCTNLYCRSAMAAPDRYRLWNRDVAACLNYMHILRGLRRNGMVPHRFRRVAVAPTRRRRRVDDQEQPRTRIR

SEQ ID NO: 4704 - protein, 446 aa, Rhizopus microsporus
MSFQIFYKDGHGNAVDEYGRPEPMDYIIDEVRYALETVSSYAQYLHNQLQKNNFVVASMADEDADVYMKEAPIKRAYTLYTDQFRFFKLMLEKVMSASAAAKQIAVLEQVMERLLQKLQDLKVSKSTVYNFVRTECNLSFKKAQFQSVDRNSEEKIQERFDWVLWPGQKKGLPAVVTVPKTRAQTTTILGAISASGLIKSQNPDVVQAEQALSQHPSSTMFVEDFDRFLQARSEHSAVLSRFYGHIITNHDNGYPFFRKIRLSAYFNKQRADQKLIQDLRAKFGEDAVFVMGNWSSPYASYYEPIRSLGFRGFFKKHRLQVFLIDEYKTSKCCPTCHNESLHTFRRVPNPRPYQCERYPAVVCHSLLRCTDLYCRPTMAAPDRYRLWNRDVAACLNYEHILRRLRCNGMVPHMLRRAAAAPTRRWRRANDQEQPRTRIRLDDVSPS

SEQ ID NO: 4705 - protein, 345 aa, Rhizopus microsporus
MLFTEGIGVSVLKQNDDTKKGGSGAGRRTKAVDEEDFKYVEKLEKEELLAGVDKCVLIDPDRHDMLYCMHGESTIESKKTYRYTSNQRAIETKSRKFKKFEESLKLDDIRAAEISLSKYKSSTVNGDKFAKHLQERATVTPVLSEYYANEYISAVETNLLPFRKMKLSSFINGQQADRQLARNLIIKFDDNATLIIGNWSAGNVKFHEPIRGVGMRRMLAKQGSKICLLDECKASSLCPSCLNDELEKFNIQDLSREKSNQLCKNQQCLEAMAGTTSRHHLWNRDMVATLNFRHILFGLRENGKRPERLCRLNASPSAGFKRKATSSASSRPTKKITNPLKLPLH

SEQ ID NO: 4706 - protein, 447 aa, Rhizopus microsporus
MDDDEVKHRIRQDIFLPAQTFKQAISQQPIDMEQILQEPIYMEALNTLRPVFDAYDRGYNFGEQGLYYDVKRNPVNHFKAIYQLSRLFVHLGLSVFNCFPLRRSWSPCYVTIDSKILCQNILGIRWSNAVDKLDYWRRVVNLDSKALKPQEGRQLRFRGTIQTDGVGVTVLKKRFDRQKRYTARFTVEYKATSYITNLTRRNHQEISGRCVAVDPGRRDMLYFVHENSTPEQPVKFRYTKQQQDKTWKTKKYRRILQDLKAQDPDVVQAEQALSQQPSSTVSVEDFGRFLQARSEQSAVLSRFYGHTITNHDNGYPLFRKIRLSAYFNRQRADQKLIQDLRAKYREHIRGLGFRRLLKKHGFQVYLIDECTNLYCRPAMTAPDRYRLWNKDVAACLNYMHILRKLRRNGMVPHGFRRVAVAPTRCRRRVDDQEQPRTRIRLDDDSPS

SEQ ID NO: 4707 - protein, 200 aa, Rhizopus microsporus
MSLKEVQGISDNTRFLEIQSKKYRQKICSSEKRFVRKQRDAATKAKPIMFIGNRGIGVGSRIKRYQRYGGDWKQKLHEQETQVCITNENMTSQTCVYCFSKLDHPIHKRMIKGKEITVTSKGPFICRNPKCVLVTKRQPVKSRDTLSALTVGLLGLSYILFHRTFPCCETSLSQSSTEFTNITSSFLNARERLGSDDVTN

SEQ ID NO: 4708 - protein, 514 aa, Rhizopus microsporus
MSFQIFYEDGHGNAVDEYGRPEPMDYNIDEERYALETVSSHTQYLHNQPQENNFDVGSVADEDAKDDPDVCMKESSSKRAYTLYTDQDKARFFKLVFEKAMGASAAAKQLGIHVRVAQRWAQLYKTDPDSIFIKHKKTGRSRILHEEHKQVILQCVDENLSVALEQVMEQLLQKFQDPKVSKSSVNNFVRTECNLLLKKAQFQSVDRNSEAKIQERFDWIHRWECTDMDFRTNCVFLDESAFHINLKRSMAWSKKGLPAVVTVPKTRTQTTTILGAISASGLIKCSLRLPQPSAKKRKREGYVELTTQNPDVVQAEQALSQQPSSTISVEYFGYFLQARSKQFAVLSRFYGHTITNHDNGYFLFRKIRLSVYFNKQWADQKLIQGLRAKYHKPIRGLGFRRLLKKHGFQVYLIDEYKTSRCCPACHSESRHTFCRVPNPRPYQHERYPTVICHSLLRDVAVCLNYMHILHGLRRNGMVPYRFRRVAVAPTRRRRRVDDQEQPRTRIRLDDDYPS

SEQ ID NO: 4709 - protein, 1063 aa, Sipha flava
MHEYAQDAMSYVRHYSRPDLFVTFTYNPQWSEIKRELLHSQTLVDRHDVSARVFKQKLKSLMNFLIKHIVYGQVRYWMYSVEWQKRAKFLDETVDPKLHTVVTKHMIHGPCGVLNYNSPCMVDGKCSKRYPRALISETITGNDGYPLYRRRSVANNGRSVVVKALNNIHRLTDEISTALENKEYCSGLFLDIAQTFDKVWNDGLLYKLKLFMPAPYYLIIKSYLQNRSFVVRQGNDISSTHPIYARVPQGSNLSPDLYNVFAADIPQSSNTLLATYADDIAILSSSPNPILASAELQDHANKIEEWAKKWKIKINTEKPDAQMGLKVSGLRRTVFSRTSNHQQFGNHGVARNFWSASGLPGICGSGEKLVATGHLRYNAKALYELLRATKPLEFKSTHENFRVAAPMYWWCYFDSSKRHFGRLDPLTNAIAAHRNRTKFAMALTTNRAYFCVSMERFTRDSIGVEPKCKRSKKKQVETNDLDFSRFSGFLGLDPGMVNYVGTCYLGVAGASDLKRNYTLKTVKFKQFVCKERAIHRRREKLIGRHEPQLLEYRKIFKNTSSKCCESYGATLAFTAYCLRHHESLHLAFDSPAAFGHVENQRARTGLFWRRFTTGRRELQREPEASRVLVASGFSQPWRDRCATVDSGEYMTTQCCSRCTERMALPPKHEDTSLIASGDDKRRRRHDHRFQFCRKCGITWNWDVSAARNTALVALGLSGDLLFLSFLTIDRTSPEEVGEAGSTMGRGDVMNLSTSSMAIWSSLLLLEIPLTFHRKMIRVENLMVVIGFNEFVYNCXVKARRKKKQPKDFHVIKSARLRNFVKEFGEDIFSCDNAVLFCKVCGVKVSAEKKYNIQQHIARGKHIQQLNIRNQQEKPKSQLLVTGMSMKSSFNEELCNVFLSANIPLTKLNIPTFRDFLHKHTKQIIPDESTLRKNYINQCYTNTIIKIRDYARNKNVWVSIDETTDVEGRYVANVIIGTLEVDNPGKIFLLNSEVLEKANHSTISKLFDRSLFILWPKDILHDNVLLFVSDAAPFMVKSGKSLKVLYSKMVHITCLAQGLHRVAE

SEQ ID NO: 4710 - protein, 267 aa, Sipha flava
MAYELLRAEKPLGFKTTHEDFRAAAPTHWWRYFDFSKRRYGRLDPLTNAIAVHRDRTKFTMSFTTNGAYCCVSMERFTRDSIRVEPKRKRSKKEQVETNDLDLSRFSGFLGIDPGWSTTWTLAISNAEDSLVQRLLDMTETKELVLVCFGDGSLRDSVSYSANRKPAVCSLRRAFHRRRNRRCLSDEYMTTQCCSRYTERMALPLKHEDTSPIASRDDKQRRRHDHGFQFCRKCGITWNRDVNVARNIALVALGLQTGGLQKTICQK

SEQ ID NO: 4711 - protein, 229 aa, Naegleria lovaniensis
MYFGHVQEIPFMSLISTTTRDXXXXHSGQVVALDPGVRTFQTTFDLNGYSTKWGSGGAERIGRLCCAYDKLQSKWSQPEVRHCKRYKYKRAGRRIQQKIRNIVDDLHKKLCLWLCRNYQVILLPSFETQKMVKKLHRRINSKTARKMLTWSHYRFKQRLLHKAREHPWTHIYIVNEAYTSKTCSCCGHIYTVGSSEVFRCPSCGSIFDRDINGARNILLRFLTTHRISF

SEQ ID NO: 4712 - protein, 477 aa, Naegleria lovaniensis
MSSSSSIRNYLSSRTAARAQAIIQHIMPLILENVRKEDGTLSTESPSLYDISEKLQLIFPPHNYQEEEIFTSPKKLLPTAFSKFEFDLFLKTLVDAINNGKIDHSNLTVMDLCGKVYDINNNILMIALPKLSFLKEINLSNVQLNDDIIVGICTKIPQIERVKLENTAITDNGCIGMIKSLPSPQNVKHLNLSKTKVTENSMKYLADLYSALENHLEKLEIEGIDVSRWTVTRLFNNCRKLCKIEKGHEGSFVIFRNNVILLVPSNPNAHSYTLRLDHPLLDERILQQKPQFITNSTCQYNHQQSVPRIGRLCCAYDKLQSKWSQPEVRHCKRYKYKRAGRRIQQKIRNIVDDLHKKLCLWLCRNYQVILLPSFETQKMVKKLHRRINSKTARKMLTWSHYRFKQRLLHKAREHPWTHIYIVNEAYTSKTCSCCGHIHTVGSSEVFRCPSCGSIFDRDINGARNILLRFLTTHRVSF

SEQ ID NO: 4713 - protein, 430 aa, Naegleria lovaniensis
MLLIAFSSKIRITELMSDGVNFISYNNKGCTDRWFNFSQFTVIESKPVFDVPLNVHHSITENVAFDNSKKPPQLKKAKKNQKVAQKFQADKSLKIRLYPNEQERTTLNQWMGTARWIYNRCLEFTNKSKGVKKNKKNFRTFVVNNDNYQTENQWVVNTPYDVRDAAAIELLFNINFEKKKAGTIDKFMIHFRRKKDRKDHFILHCKHWKSKKGQYSFIRNIKSAEPLPKELQYNSVIIKNKLNHYYLCIPQVLDIRGGAERIGRLCCAYDKLQSKWSQLEVRHCKRYKYKRAGRRIQQKIRNIVDDLHKKLCLWLCRNYQVILLPSFETQKMVKKLHRRINSKTARKMLTWSHYRFKQRLLHKAREHPWTHIYIVNEAYTSKTCSCCGHVYTVGSSEVFRCPSCGSIFDRDINAARNILLRFLTTHRISF

SEQ ID NO: 4714 - protein, 555 aa, Ostrinia furnacalis
MSKYVSISVAAKTLGVSIQTLRRWDEEGTLVADRTPKNHRRYDLSKITPEQIHKPDSQLQRKTIAYARVSSHDQKEDLIRQQQVLEMYCANQGWTFELISDLGSGMNYRKKGLNKLLEAIMNDEIGRLVLTHKDRLLRFGAELVFALCEAKSVEIVILNKGENLSFEEELAQDVLEIITVFSARLYGSRTSHFAQASGVARLSYNWALKEWQRQYKADKEYRDQCDYYGVQVDKKLLNKPSEAKIRRHLNSFKREKYPFMLKVTKCAPQLAIKQLGSSFDRFFNGQSKYPKPRKKGVDDRFSLSNDQFSIKDRKISIPNLGWVKMTEDLRYQGKILSAKIFKQGGKWFASIAVELNQPEKLHPKTGLSVGVDLGVSSLATLSNGEVVPSSAPLKKQLAKLRRLAKSFSRKKKGSQNREKAKTKLSRLHYKISCLRKNNLHQVTSDLVKRFDLIAIEDLNVKGMVQNRKLSRAISDMGFYEFKRQLIYKAKQHGKSILSVGRFFPSSKMCSNCGELNQNLTLAMREWRCSCNTLHHRDINAAINILKHADKELVAT

SEQ ID NO: 4715 - protein, 434 aa, Ostrinia furnacalis
MKINKAYKFRLEPNAEQELVLNKLLGSARFVWNQILALSFEMLAKNERINKVNLVNKIPELRKKPECTFLENSSNGVSLQQKVRDLGDAWAKFFDKKEQAKLKQKPFKAKKPKFFKLADGSEVQLRPLMPRFKKKSDGYDSIRIVQFGRYCWVKGNQVKLPNDIGVVKFRKSQDILGEIKNVTISKHVGKWYISFCVESTVEPPIHSSKSAIGVDLGIKKLVTTSTGQVFDPINSFKANQVKLARLQRKLKKKNKFSENWKKLNLKINKLHHHIANIRHDYLHKVTTTLSKNHAMIVVEDLKVANMSKSAKGSIEKKGKNVKAKSGLNKSILDQGWSMLVDMLEYKQQWRGGLLVKVDPKYTSQTCSSCGHVAKENRLTQANFSCVSCGFSENADINASRNILAVGHTVLSVEGGCGKGRPAKQKASEIREEVT

SEQ ID NO: 4716 - protein, 331 aa, Ostrinia furnacalis
MKTLKLRIKDKHYKVLDQLASEVNFVWNYVNDLGFKHLKRKGEFLSAYDIAKYTKGTSKECNLHSQTVQAITEELVTRRKQFKKAKLKWRVSNKKSARRSLGWIPFKKVAIKYADGYVQYGKHQFKLWDSYGLSKYNVKTGSFVEDSRGRWYVCLVVDKTKQVKSKGNTSIGIDLGLKDLATCSDGVKLKAPQIYRQYEQKLGIAQRARNKKRVKAIHAKIRNIRQNTLHQFSHKLVNKHAAIFVGNVNAKALARTKLAKSVLDASWTTLRTMLKYKCENASVWYKEVNEAYTTQTCSSCGSRCSSPKGRTGLGIREWQCMECGTFHXSNY

SEQ ID NO: 4717 - protein, 248 aa, Contarinia nasturtii
MTDMYYLANTVLGVVPSSRNPLTNRMNKYTLDYYMYGHRDELWNLVFDMDKIKQIGKQKQFNFQIVTNSVCVSILYEKPAKAWVENSEQATFNNMTYASAIDPNEKTWVAVVRRHIKSNIEKKRDRKADRLTWWFVEEEQMDFKSYPVIPSPRGSTWKSYIQHRIKMLRMGMQAYATRKYARLDVDHHIKATKTSDKVAMRITKNKPSWIWIGVGFMAPNRPWGIKKRKRCPGTRKLAISFKKQEHTK

SEQ ID NO: 4718 - protein, 246 aa, Contarinia nasturtii
MDKIKQIGKQKQFNFQIVTNGVCVSILYEKPAKAWVENSEQATFNNMTYASAIDPNEKTWVAVVRRHINSNIEENIKISNPRFHWQTEQKKRDRKADRLTWWFVEEEQMDFKSYPVIPSPRRSTWKSYIQHRIKMLRMGMQAYATRKYARMDLDHHIKATKTSDKVAMRVTNNKPSWIWIGAGEMAPNRPWGIKKRKRCPGTRKLAISFKKQEHTKEFTSQFRFVEIGVEIGMVGIVDAIIQALHK

SEQ ID NO: 4719 - protein, 462 aa, Contarinia nasturtii
MKVFQMNTNEAIEEKYLPSDIDCVVKLILKEKVIKVPASDPNKLYRCGVLYDIVNKLNVFPEIDLHDLTTNSKNWFKAVPMYLSMQREIEEFNLLRAHQEPPKKRKKRKRRRPKGKKRKWIIKRKQMLDDLEYLPCIRNLVVVPIDGIAVSLQYSTKKKETSNTQSGTSRLDIIDMLKAGKFKRLGAKRFTKNFIEKERQDRENRELYAMMPSPKGSQWLSYIKHRVKMTKHGIEAYSTAKYTRLALDKYIRSNKAIDGFVNKITNKEPTLLFHGADGEVPPDCPIRIKKHVRCPGVRKLMQAYKKRPYIVVVPVDEWGTSQTDARCMCRFQNQPKSAKFKMCRCIPNAITLLPTKIVSKFGKTDTSTYRQLQRTLNGAFEIEEELMSRVKPYYKKWQLDLECTVTWHRDVVAAKNILLKGLWTLLGLPIPAAINRYWNQINADAAVFDDDNDVDISEPEFE

SEQ ID NO: 4720 - protein, 447 aa, Contarinia nasturtii
MLAGEKPVESSKKPLLLVNNKQGSDESDKVQLMQQVSEESNNGNNEKLSEIVPPLPPASMLNTGVSGGSSPSREVQEILSQKGSDCINDFYSNSIDIQDDTDASGNNCDAADGNDEEKNSNQDDDETYTLNNEIQKHLLPVVGARLDGIKAQIQSEIAQKLTITDKVIKENISNICKSKYSTKKKETSNTQSGTSRLDIVDMLKAGKFKRLGGTDSGMRNWNTTTILTKKLALDKYITSNKAIDGFVNKITNKEPTLLFHGADGEVPPDCPIRIKKHVRCPGVRKLMQAYMKRPYIVVVPVDEWGTSQTDARCMCRFQNQPKSAKFKICRCIPNAITLLPTKIVSKFGKTDTSTYRQLQRTLNGAFEIEELMSRVKPYYKKWQLDLECTVTWHRDVVAAKNILLKGLWTLLGLPIPAAINRYWNQINADAAVFDDDNDVDISEPEFE

SEQ ID NO: 4721 - protein, 451 aa, Contarinia nasturtii
MGNAFNELFKQYTTNLKNNIKVWSYSRIRKFFVLKRFELNLVLGNNITEIDVKNATKSVMFNNIMRTSANVNLLLDQAKLIGIPVGEKFHDRVKEHWFQTIPVFIHIQRQIFDHHVRYTLLNEQWRQYWRDRKAKKNPTPPRIARPPYLKNFRVIPLHDFEMKHIRIDFHLFYEFARKLGALKLTKGWFGQPKSISKEMYSDDPATYWDKIFNMPKILKIGGGKAFDYAILTDSVAISLCFVKPERPIIELTNEQINDKFNNNEFKFVLGMDPGVRTWNATVRKHIKSGIEENITIDGPKYHWHAKYGKRKRKIDKLIEEFTKLEQDDRKRYAFYPSAKGRSHWMCYIEHRVKMMQRGMSVYSSRKYLRQRLDKYIEENRASDLIAAWLTLKKACLIFIGAAQMAPNSPIGIKKRLRCPGVRRLVRSFNKLGNCIIRDSDDDYVLEVSDDE

SEQ ID NO: 4722 - protein, 415 aa, Contarinia nasturtii
MANRFKPSIPAKGETKDEITTIKCALKPSKPKSSYKPQGTKPRGPRAELPRIDSEFKAIVEGLDDYHRIDWPNNKDFSNGLKHLTNQYTDNVVTNSTTHPNKHITQYLKLKVFELSTDGEEDAEKFLPSDIESVINFVMSSKQFHWQTCQNVRNAKAKRWTKDFVQEKRRDRENRKIYPVMPSPKGSQWLNYVKHRIKMMKHGICAYSTAKYTRLALDKHIKTSSVVDNWVDKVTDKPPTLFFFGVDGEIPPDSPISIKKHVRCPGVLKTLRRKMYEAIPKPEQSRQIQEMPVHTRRQNLATKKNCVKVEQDGSIGFDSCNEPLLSKVKSYYKNWQLNLECSVTWHCDVVAAKNILLKVLWTLLGFPIPEAINRYLYKAREAVAEATEVAAATAANVDNDVEMFEYDQQPADHAV

SEQ ID NO: 4723 - protein, 715 aa, Contarinia nasturtii
MGRHKKADPNADQRCIKQGLPSIIRERYRDVIVAIISYLSVKATKIACLASLLFLMKAVLVDNIGNISLMLPGFRNIVDAAHIDWPTNGGFGNGFKYIWEQYYDNVKTNLTTHCESRLRKFFKMRAFELNDYAIKYNYFNNLYGMIEFELPYYDEEDIKNAINYTYRRRNTAIGDVEREMRLGELLDELRWLGAPDDCNIRDFVKEDWFKSIRMWSEIQRDIRNFHFAYEDRRDKPQIKNFVVVPMCTFQRRHIRIDTDALYVILSNAKLVPRKCGKRTRKDGTTNFKNITSNEFRTNKILSWNLFFDVEKILKLVHNKKEFDSQICSDGVSVSLMYKKPKVPPVETTDDEIKAMYDSNELKYAVGCDPGMRTWNASVRRDLHTKEEVNLRISSKRYHWDAKQGLRNAKAERITRLFTFEEQADRNRIAAMIGEMPSPKGPSWRSYIEHRLRVMNDGIETYSTKQYARLGLDKHIESVRAIDKTACKMVHNQPSIFYMGASGSTPANSPIKIKKHVRCPGTRKLLAAIMKRGNCIIRMVDEYMTSQHCPLCFKRFPQQTRRDRYKTCVGCVPNPIVGLPRTIVTNVSKRLLQMRRTIERMWREMRDIGDVIAATLRDGPNAGRLVSKKQRFFKTWLPNVANVEIEGAAGAQPTLTTVWHRDIAAAKLIFYKGECVVFKRTIHPNVRRPRRVDNNQPLPLYRGQNQNVNNGHLQPQ

SEQ ID NO: 4724 - protein, 682 aa, Contarinia nasturtii
MDAERERREYILRKNQERDARLDTKRRNERSSISFAFGSSTPRLLDPVEVNLVVPSGAYWNSRRSTSISNVSYGGGTQLSRRSSERELSDGTKKRATSASGLDRPDERQTTIKTIVCRSAIFVNNVSKRYKRCIIENVHIIARNAETKCSISATEKVENVSEPMIHDVETTIETKTVETVTSTTEASSEDNENVHTVQETYEIKTETTSESEPVSNDENVDNNKLTEPENNEMTASMIQRRILSAEEAKAALAERRRLAREEAERQAELERQKQEEERLRQLKLQEEEEEKQRQFELEAQRLVEEQRQAEEKRLQQAIEEARQREEEERLRKGDWEDQDYYNFWNRYANLPKVNRRSQKFDYCITTDGITVCLKMIRHKRQVDESNVPNEVGSNRNERDLSDVIPDDVQAAFDANKIEKIIGNDPGEKVMIATTRLNIAAEEEVSYRLTSKQWHWQVGTVKRKKMMKKFTGKFEAECRRLRENREEYPETPSMKSRDHETYLAYKLRVFEESGQVKYKRRVARLRFDKYVQTQVTAHEICREMTGLQQEIPNREDRKIIYALGNAKLAANSPIKGHLRSPKPAVTKTMNRYVLTMGVKEPGTSMFCSKCRDMTERAKEVARRKGHIENYNKKDRPEIWYRINRKVRRLAQCWVALVNQLHMATHHKVLNNCSNDNGSKAHNF

SEQ ID NO: 4725 - protein, 472 aa, Contarinia nasturtii
MSGRKRKGVGAICGSRPKRRKVGKLPEESGLLAIKVSAATAVKEEYHDIVLPWIAKKSIECTKICELASLLFLHKVKLANEEAILTNNWKFFDEGDGIHIIEGCFFAVLRKYKEENDMVPEFRDIVELVSDELIKKRYEDGVYIYELGIDPGMKTWNATVRRHIDSGKEMNFKTSSKKYHYLTKQGVRNRKAKRWTRGFVAFEQNDRNDRTRYPQMPSPKGENWRDYISHRLRIMKKAIDVYTSERYTRLRFDKYIESNRVCDKIAAMLTNGKPCIIFLGAANISPNSPIKIKKNIRCPGNRKLIKSFKKMLGNVVKMVNEFRTSRLCARCFEPFPLETLGHRFKVCEWCVPDNNDWPEGLKLPEKIVTMKSKRMLLSERQELRDAMVANPNQAVGFVSKVICYRKNWRQNAAYDAVNNVAQLPGIIRDENVIDFTEDYMLLDDDFYVAEEEAILNTIWHRDIAAAKLIMYK

SEQ ID NO: 4726 - protein, 319 aa, Contarinia nasturtii
MFGQMQRQIEVFHQYAQQWHAFRRDGLITNNRPPKVNNFALVPLCRFQLKNVRLDMTDMYYLANTVLGVVPSSRNPLTNRMNKYTLDYYMYGHRDELWNMVFDMDKIKQIGKQKRFHSQIISNNVCVSILYEKPAKAWVENSEQATFNNMTYASAIDPNEKTWVANVRRHINSNIEENIKISNPRFHWQTEQKKGDRKADRLTWWYVKEEQLDLRSYPFIPSPRGSTWKTYIQHRIKMLRMRMKAYATRKYARLDLDHHIKATKTSDKVAMRITNNKPSWIWIGAGEMAPNRPWGIRKRKRCPGTRKLAISFKKQEHTK

SEQ ID NO: 4727 - protein, 379 aa, Contarinia nasturtii
VEKNDGLSEIICKKCLARLQIAYDFKRQAVESHRELRSFISNVNKQFKQVTGTKTKQKDGESESYDELEDDMQAIIDDEVEYKEIDVEFSDDTKKAIDREQLVEILGENNAITIRKTRAVKIQEDANNEAPENMEVYLVEEGHEGESGFILDEYDENGGELIVDDVDYLEDDDIDDLYETCLRVNIVREASEGLGGAWVENSEQATFNNMTYASAIDPNEKTWVAVVRRHIKSNIEENIKISNPRFHWQTEQKKRDRKADRLTWWFVEEEQMDFKSYPVIPSPRGSTWKSYIQHRIKMLRMGMQAYATRKYARMDLDHHIKATKTSDKVAMRITKNKPSWIWIGAGEMAPNQPWGIKKRKRCPGTRKLAISFKKQEHTK

SEQ ID NO: 4728 - protein, 852 aa, Contarinia nasturtii
MVETLTNNEFEWPSRDLMGNAFEYMHQQYLSNVTTQHTTHCEKELAYFLQMKRYQFNQEPYRLFKFDDIDIRNAIESIMRNKDWSEGDPVRKFKMNELFVAVKERCLPSFGDYLTMTQYIEKKWFESLYFFIQIQREISEFKAEHQQLVHAWLRHKKKPLLFEKPTQPLPPKIRNITVVPLCDNKLKHIRFDHKDLLALLARWKLIPEEFGGKDGGSSLYSNNHFEENPYDAWNILFDMKKINELKRPNQQFHRMIVCDSVSASVLFEIPKHEKTEFNRERIKQKLEAGDYTYIIPLDPGVNTYYAGFRRNIETCVEENIKISPKQYHWGARQGIRDKRAKHMTATFTKMEQSDREENYLVIPSPRGNGWIYYLDHRLKMMQDGLAAYARRRYARLSLDKYIDSQHETDWLAKSLTKNKPSLFTIGDADLPANSPIDVVRVDEAYTSQHCASCMVKCSKETKKFRFKACKNCPRNAPIPAEIAKYMSLPPLIVSKKGSRRKTLDRCVKKLIDRGLVNQANLPKESKPERLASPKMIEKYRPTQLNELVSHEEIIATISKFIDQNQLPHLLFYGPPGTGKTTSILACARRLYAPKDFHSMVLELNASDDRGIGIVRGRILDFASTRTIFSNGFKLIILDEADAMTNDAQNALRRVIEKYTDNVRFCIICNYLSKIIPALQSRCTRFRFAPLAEEQIVPRLDFVIDQERLNVSDDGKKALIKLANGDMRKVLNVLQSTWMAYKNITEETVYLCVGHPTPSDIKTIMNWLMSVESFEECFDKIQDLKMQKGLALEDILREVHLFVMRIELPPRVMSCLLIKMARIEQSLAAGCCEKPQLSSFVAAFQIARNMVSV

SEQ ID NO: 4729 - protein, 272 aa, Contarinia nasturtii
MPSPKGSHWLDYIKHRIKMMKHGICAYSTAKYTRLALDKHIKSSSVVDNWVEKVTDKQSTLFLFGADGEVPPDSRISIKKHVRCPGVRLTLRSIKKRRDCAIELVDEWGSSQTDARCMKRFQNQPKSARFKKCRCIPDARTLLPIKIVSKLGKKDLSEFRLLQRAMNEALEENEPLLSKVKSYYKNWQLNLECSVTWHRDVVAAKNILLKGLWTLLGLPIPDAINRYKARDAVAEAAEVAADVAEAAAAAAANVDNDVEMFEYDQQPADHAV

SEQ ID NO: 4730 - protein, 354 aa, Contarinia nasturtii
MIVCDSVSASVLFETPKHEKTEFNRERIKQKLEAGDYTYIIPLDPGVNTYYAGFRRNIETCVEENIKISPKQYHWGARQGIRDKRAKRMTATFTKMEQSDREENYLVIPSPRGNGWIYYLDHRLKMMQDGLAAYARRRYARLSLDKYIDSQHETDWLAKSLTKNKPSLFTIGDADLPANSPIDVFRVDEAYTSQHCASCMVKFPKETKKFRFKACKNCPRNAPIPAEIAKYMSLPPLIVSKKGSRRKTLDRCVKKLIDRGLEKTLYFDMFDTRGKIDVISVFMIDNNLAYPTNKLLYDFQQRHYNEVYPSFDKLERGKYPSRKRMKQMRDNGFDYLEYEDSILIPEMYGYERIE

SEQ ID NO: 4731 - protein, 508 aa, Contarinia nasturtii
MRVFELNDYANRYNYFNDLFGHADAAPNYDDVDVKNAVNYTYARRDTTNGDAERELRLGELLDELRAMGAPDDCNIRDFCKGDNWFESMRMWIEIQRDIRMFHLAYSDRHDKPKISNFTVVPKCYFQRRHICIDVQALYAILASAKLVPLKCGVRKGKNGSNNMINITKNEFTGADKEKSKEEKKEIQMKSWNLFFDLNTIGKWVNFKKDFHNMIHSDGVSVSVIYDKPKVEPLVLSDEQLLAAYRAKKFKYEFGNDPGERTWHASVRRDLETKEEVNMRISSKRYHWDAKQNRRNAKAELMTRLFTFEEQSDLKQMARTLGEIPSPRAFFKRGNCVIRMVDEYMTSQHCARCFRRFPIATRKDRYKKCVDCIPNPAVRLPTMIVTNVSKRALQMRREIERTWRLMREMGDAIVAAFRNAPNTRRLVSKKQCFLKTWQPNAVNVGIEEAAQAPVPVPITVVWHRDVVAAKLILYKGHCKLTNKPIHPNLVRPRRNINNVPLPFYGNQP

SEQ ID NO: 4732 - protein, 755 aa, Contarinia nasturtii
MSTTGETTAATAPRKKRYKFQTNAQKEKDADDDVNDNGLFAIKMRLNTILRPEFNHIVKPWIEQKSIMSTKITVLASLLFLDKVKSAQMNRQWEFFKNRTYPAKKGKKKGQLVEKNRGEEVIEQCFYAVLQKNKEGENMEPHFRQFVEELSPENNFAWPKNDYFGNHFKTLCQNHTRCLKTGQKTHCKKKLKNYLRMRAWQFNAVSTGWKFDKKDIDNAVDLMIRGYNAIRDTHQNADFKRHKRTLLTGMVTAIVREVGGPTNDHNIKDFSKGDYWFKATAMWLVMQTEIDEWHNWAQDNNVKIPNIKNLSVVPLPDYQRKAVFMCNDVFYRMLAESKQLPQVDGRQATESYIRQNKEFYWNQVFDLTTINRKLKKNKEFHYTIVSNGESVSIMYRMSKQHKQQMQNDDILRKQFIDGKFAYELGIDPGMKTWNATVRRNIETKKEVNMKTSSKKYHWLAKQKTRDVKAKRWTKQFTQEEQDDRNNRQLYQRMPSPLGILWIDYVHHRIKMLKKGMAVYTTPKYTLLQFDVESNRTVDKLTGNLVNHKAAIIHMGNAEISPNSCIRIKKHVRAPGTRKLLKGFRKRRNCRVRKTDEWGTSQHCAKCGRRFNPATRSHRFKVCENCGAEPDSIFAEYLPSKIVAQRSKRQLRYNKDDVELNLMRFWAEGLMTEQEFDIAAERLLSKVAVYPKNWQVNTPYAVDDENELEIEDKQLLMAVHKTSWDRDIVAAKCILIKDMGNTLMYIHMKSQDNVEY

SEQ ID NO: 4733 - protein, 462 aa, Contarinia nasturtii
MVRAIVEEVGGLANYENIKQFSKGKYWFKATAMWLVMQSEIDEFHNWAQDNNVTIPKIKKKHLQRLLDDDIVRKRYLDGTFVYELGIDPGMKTWNATVRRTISTRKEVNLTTSSKKYHWLTKYKMRDKKAKRWTKQFTLDEQNDRNNRQLYQRMPSPLGTLWTDYICHRIKMLKKGMDVYTTPKYARLKFDKYVESNSTLDKLCGTLVNHQAALIHSGNADMSPNSPIRIKKHVRCPGTRKLLKGFRKRGNFVVRKVDEYFTSQTCAKCGGRFDPNTKSNRFKVCENCAPVPNSIMANFLPSKIVAQLSKRRLKYNKVYIEESLAVFLARGEMTEHDFDIIADRLLSKVAVYPKKWQVNAVSGVLEYAGVKDDQQPHPVDDENAAEIDGEVAQQPCTVDDECVTEIDDKQQPMIVHQTTWDRDIVAAKCILFKGHCNLFGLDIPLTLQRPRRQQAVQNNQQP

SEQ ID NO: 4734 - protein, 355 aa, Contarinia nasturtii
VNLKTSSKKYHWLTKYKMRDKKAKRWTKQFTLDEQNDRNNRQLYQRMPSPLGTLWTDYICHRIKMLKKGMDVYTTSKYARLKFDKYVESNSTIDKLCGTLVNHQAALIHLGNADMSPNSPIRIKKHVRCPGTRKLLKGFRKRGNCVVRKVDEYFTSQTCAKCGRRFDPNTKSNRFKVCENCAPVPNSIMANFLPSKIVAQLSKRRLKYNKVYIEESLAVFLARGEMTEHDFDIIADRLLSKVAVYPKKWQVNAVSGVLEYADVKVDQQPHAVDDENAAGIDGEVAQQPCAVDDECMTEIDDKQQPMIVHQTTWDRDIVAAKCILIKGHCNLFGLDIPLTLQRPRRQQAVQNNQQP

SEQ ID NO: 4735 - protein, 775 aa, Contarinia nasturtii
MLPDFRQLVDAARIDWPTNGGFGNSFKYLYEQYEDNVRTNLKTHCESRLRKFFKLKTFQLNDNAIRYNYFNNLYGSPNELPYYDETDIKNAVNYAYHRKDNTNDDVERQLRLGELLDELRWLGAPEDCNIKEYVSENWFHSIRMWIHIQREIQWYHNEYKCRRDAPQIQNFVVVPMCSFQRRHIRIDTDALYTILASVKLVPLKCGLKKRKDKTTNSINITSNEFRRNKILSWNLFFKVEKIQQLVHFKKYFDFQICSDGVSVSMMYKKPKLPPLEISDAEIMKMYKGNKLKYAIGCDPGMKTWNASVRRDLDSKEEVNLRISSKRYHWDAKQGRRDAKAERITRLFTYDEKADRNRVAATLGTMPSPRETSWRSYIEHRLRVMNDGIETYTCKQYARLGLDKHIDSVRAIDKTACKLTRNQPSIFYMGASGSTPANSPIKIKKHVRCPGTRKLIAAIMKRGNCIIRMVDEYMTSQHCPLCFKRFPQETRRDRYKKCVGCVPNPIVGLPRTIVTNVSKRLLQMRRTIERMWREMRDIGDVIAATLRDGPNAGRLVSKKQRFFKTWLPNVANVEIEGAAGAQPTLTTVWHRDIAAAKLILYKVNQELALKYIDENENHGRKKTANLLKDDRFKALFSNPLFEVDKNADEYKMLTPVLSRLQKNKVKELKRKVEITMPFMDENEKAPSSDDDLFSEKAEDEEMESSDDDDRAWEKDLKQTYRQIRIDQKIKSFAGDENSTENENETDETTPAFAKTSKEKGKDIEFKVSNITAKANK

SEQ ID NO: 4736 - protein, 232 aa, Contarinia nasturtii
MYDSNELKYAVGCDAYVERFRTMRFAYQRRGEFAYIQQAISLQRMRNKADVMQKPNESHDYLHSKGKLIYARLGLDKHIESVRAIDKTACKMVHNQPSIFYMGSSGSTPANSPIKIKKHVQCPGTRKLLVAIMKRGNCIIRMVDEYMKSQHCPLCFIFFEMDRMQDYGHWTLLGLPNRKFRYQRRSIDICTKLAEDSEVAAGVAEAAAAASANVDNDVEMFEYDQQPADYAV

SEQ ID NO: 4737 - protein, 817 aa, Contarinia nasturtii
MKTWNATVRRHIDFDKEFNMSTTGETSAAQAKKKRYKYQTKKQQEEEAEDENFNDNGLLAIKMRLTTIVRPEYHDVVIHWIEKKSVMSTKISVLASLLFLDKVKSAQNNRQWDFFTNRMYVNQKGKLVEKNRAEDVIERCFYAVLQKNKENEDMEPHIRHFVEQGLSRDNQFAWPNNNYFGNIMKSLCQSYTRQLKTNQTTHAKKRLRNYLQMRAWQFNAVSTGLRFDKKDVDNAIDWAIRRYDAIRDTHQNAPLKRYKRKLLLDMVRAIVEEVGGLANYDNIKQFSKGKYWFKATAMWLVMQSEIDEFHNWAQDNNVTIPKIKNLSVVPLPDYQRKAVFMCNDVFYRMLAEEKLLPKVEGKQVTETFIRENKEHFWNQIFDFDKINRILKKNKEFHYTIVSNGESVSVLYKLSKQHLQRLLDDDIVRKRYLDGTFVYELGIDPGMKTWNATVRRTISTRKEVNLKTSSKKYHWLTKYKMRDKKAKRWTKQFTLDEQNDRNNRQLYQRMPSPLGTLWTDYICHRIKMLKKGMDVYTTPKYACLKFDKYVESNSTIDKLCGTLVNHQAALIHLGNADMSPNSPIRIKKHVRCPGTRKLLKGFRKRGNCVVRKVDEYFTSQTCAKCGGRFDPNTKSNRFKVCENCAPVPNSIIANFLPSKIVAQFSKRRLKYNKVYIEESLAVFLARGEMTEHDFDIIADRLLSKVAVYPKKWQVNAVSGVLEYADVKVDQQPHAVDDENAAEIDGEVAQQPCAVDDECVTEIDDKQQPMIVHQTTWDRDIVAAKCILIKGHCNLFGLDIPLTLQRPRRQQAVQNNQQP

SEQ ID NO: 4738 - protein, 715 aa, Contarinia nasturtii
MGRHKKADPNADQRCIKQGLPSIIRERYRDVIVAIISYLSVKATKIACLASLLFLMKAVLADNIGNISLMLPGFRNIVDAAHIDWPTNGGFGNGFKYIWEQYYDNVKTNLTTHCESRLRKFFKMRAFELNDYAIKYNYFNNLYGMIEFELPYYDEEDIKNAINYTYRRRNTAIGDVEREMRLGELLDELRWLGAPDDCNIRDFVKEDWFKSIRMWSEIQRDIRNFHFAYEDRRDKPQIKNFVVVPMCTFQRRHIRIDTDALYVILSNAKLVPRKCGKRTRKDGTTNFKNITSNEFRTNKILSWNLFFDVEKILKLVHNKKEFDSQICSDGVSVSLMYKKPKVPPVETTDDEIKAMYDSNELKYAVGCDPGMRTWNASVRRDLHTKEEVNLRISSKRYHWDAKQGRRNAKAERITRLFTFEEQADRNRIAAMIGEMPSPKGPSWRSYIEHRLRVMNDGIETYSTKQYARLGLDKHIESVRAIDKTACKMVHNQPSIFYMGASGSTPANSPIKIKKHVRCPGTRKLLAAIMKRGNCIIRMVDEYMTSQHCPLCFKRFPQQTRRDRYKTCVGCVPNPIVGLPRTIVTNVSKRLLQMRRTIERMWREMRDIGDVIAATLRDGPNAGRLVSKKQRFFKTWLPNVANVEIEGAAGAQPTLTTVWHRDIAAAKLILYKGECVVFKRTIHPNVRRPRRVDNNQPLPLYRGQNQNVNNGHLQPQ

SEQ ID NO: 4739 - protein, 554 aa, Spodoptera frugiperda
MAACKTCGGSDHTRTSSKKCKNYLPPIRKRNLSESTQLEIYTVKRGLASCLCPLLDPEKKLKLLTEIRRDVRDLSRVYIELGVWYNYYMKTSTELPPKPDVLNFIYAMKGKGPYNNVYSTMFSERKFDDKLRSFVVQEMAKQYETVLHTNISTHAYSRLARYFNVKRNDPALFSAFFKKVLPDDNEEMRRVCSIINVDTVGGAKWWSTIPEWLKIQAKLEDFRLFPQPSHGLKHITYTSRGWHELLRRVDPKSITGNWPKIIDHRRELWAPWLDINMIKFGCTLQTDGFSVSLSMSRIKREPSTSQPQKRSKKSYDRIIAVDPGSRIPVAVVESRRFKFQRVTKKYVRSHTLEWKRARVKDKLCRVSEEAEQKAREKLDFPVSSKNMSHVVEYTVFRMHWFNVRQEPYEKHAKLSRLKLDKYIRTAKCEEKIIKEIFDDGSNTLVLYGAGSKFMNKASFSGRKFKHDSLIKRLRSKPNIDVAVVDEQYTSQACSSCNATTGQFQKIVMNHRLRWGVCPNCNSEFDRDTNAAKNILINYTRSTLCRPGCSTNGAS

SEQ ID NO: 4740 - protein, 554 aa, Spodoptera frugiperda
MAACKTCGGSDHTRTSSKKCKNYLPPIRKRNLSESTQLEIYTVKRGLASCLCPLLDPEKKLKLLTEIRRDVRDLSRVYIELGVWYNYYMKTSTELPPKPDVLNFIYAMKGKGPYNNVYSTMFSERKFDDKLRSFVVQEMAKQYETILHTNISTHAYSRLARYFNVKRNDPALFSAFFKKVLPDDNEEMRRVCSIINVDTVGGAKWWSTIPEWLKIQAKLEDFRLFPQPSHGLKHITYTSRGWHELLRRVDPKSITGNWPKIIDHRRELWAPWLDINMIKFGCTLQTDGFSVSLSMSRIKREPSTSQPQKRSKKSYDRIIAVDPGSRIPVAVVESRRFKFQRVTKKYVRSHTLEWKRARVKDKLCRVSEEAEQKAREKLDFLVSSKNMSHVVEYTVFRMHWFNVRQEPYEKHAKLSRLKLDKYIRTAKCEEKIIKEIFDDGSNTLVLYGAGSKFMNKASFSGRKFKHDSLIKRLRSKPNIDVAVVDEQYTSQACSSCNATTGQFQKIVMNHRLRWGVCPNCNSEFDRDTNAAKNILINYTRSTLCRPGCSTNGAS

SEQ ID NO: 4741 - protein, 554 aa, Spodoptera frugiperda
MAACKTCGGSDHTRTSSKKCKNYLPPIRKRNLSESTQLEIYTVKRGLASCLCPLLDPEKKLKLLTEIRRDVRDLSRVYIELGVWYNYYMKTSTELPPKPDVLNFIYAMKGKGPYNNVYSTMFSERKFDDKLRSFVVQEMAKQYETVLHTNISTHAYSRLARYFNVKRNDPALFSAFFKKVLPDDNEEMRRVCSIINVDTVGGAKWWSTIPEWLKIQAKLEDFRLFPQPSHGLKHITYTSRGWHELLRRVDPKSITGNWPKIIDHRRELWAPWLDINMIKFGCTLQTDGFSVNLSMSRIKREPSTSQPQKRSKKSYDRIIAVDPGSRIPVAVVESRRFKFQRVTKKYVRSHTLEWKRARVKDKLCRVSEEAEQKAREKLDFPVSSKNMSHVVEYTVFRMHWFNVRQEPYEKHAKLSRLKLDKYIRTAKCEEKIIKEIFDDGSNTLVLYGAGSKFMNKASFSGRKFKHDSLIKRLRSKPNIDVAVVDEQYTSQACSSCNATTGQFQKIVMNHRLRWGVCPNCNSEFDRDTNAAKNILINYTRSTLCRPGCSTNGAS

SEQ ID NO: 4742 - protein, 401 aa, Bradysia coprophila
MERRSKEFHYEILTDGVSVSIAFRRKNAKPLPESFEELAAQQAQKYRQFGCNLENKSYDLMVGVDPGYKLYIAALIKDTRTNTEKHIKISSKSFYSMTRQNYRDKKSKKWTAEYETVAKLDREDVNVYDEYPSSLTPQYMNYISHCMKFFHRGHERPYTTRKYSRLQLDQYIRTQQSMDSIVHTLTDNVGNGRILVCIEGKPFNPSSPIKKYRRCPGIRKLFQCLKKVPVCDVMFVDEYNTSKACGCCYRSFDQPKHKHWDTRKIRHRVCDDCHPDAEIISLPNTIIAPKSQRQLQTEKREVRHLIYQDNPSISWNESAQLANLKFAFLPEHKKHNQFQKVPFNPAIHKAVQKTVWNRDISAARNMIVKGVCALSNIATPASLTRPATAPVADSDTSDEDY

SEQ ID NO: 4743 - protein, 908 aa, Bradysia coprophila
MTGRDKSLKVPEETEQPPQAGASRDESLSSRRSFETEQVEIIDLQRDVQITDQMHVELEEIGNSIGAPIIYRPKRWSNTIGRTKEFDLVLIRIPHFLPAITAPTIEISSDTEEKSQRVSTSKKRKLQTKNVGDTSQRGNTSKKRKLQDFSASKTKSTKGENPSPRDGSPTPSDGNDKPNNAPKRKRENRYTKKEDRTYKSITVVKCALGSLLKADHRTIITDCIEDMCRHATKICVLGSLAKLDFVNEEYNDESDVFDQDPAPYIQRIFEGVTQGGYFDFIGHLPVNFRTLLEQSDVERPSRSCLNNAIKNLHQMYLTVFHTNIKTHAKRRIVKLFTWWHILDHNRKPNKQETKSFQAAANFAFNRRSRCNRNAALIDRLVEYIPDNITADNRDSNERGFLQDLLQKQHFFRIVPLFVNIQRDIDAYQLYCIRHYQRMLMSNFAVVPLHSYKTKHIQIDSDTWRLLLQHLEIHPTKWNAKRTKEVGLTSKEFKANEREHWLAYLNEKTLKRMERNGKRFKCSISTDSVAVSIQFESDKDPRPESFETLKNKQKAKYKQFKNRYENGEYTRMIGLDPGYKLFISGVVRDDPANEERLVKLSSRQYHNMTCQNIRDRKSKNWTDDFERRCREEREAHRSTYQSVISPQSRTYRVYIAHRLQHFNEGIDLYTMKKYTRLQFDKYKRAQSTIDNIVNDLVTPVSSGERNLFVVGGTEFPSNSPIKKYRRCPGVRKFVDAVKKRENCDVVFVDEYNTSQVCGKCFRYFKGNAYEKARHERWERQGHRHRTCSDCEPTSDYYLQLPSSIVTRESPHAITIDVLARTQRMFTNHNVTYNEAAAASKQIYYANGEARYRKVFEKQANYINRDTPLKTVWNRDVSAGRNILIKGLCLINRRRPPASMDRPAQEEDNQ

SEQ ID NO: 4744 - protein, 209 aa, Bradysia coprophila
MDGIVNELLPPSRSHEQSLLVIGGTEFNPSAPIKKYRRCPGVRQLVKFVRKKTRLDIVYADEYNTSQVCGRCQRCFKTSVDETIQHKRWERKGARMRMCSNCTPNDNVIPLPTTINTRMSPRAQHLHRLAITNRLFFNMSAYSMEDAKRESDNIHYIHIAENCCYDVSLYKHTFDPNDRMTQLKCVWNRDISAARNILIKGVAFICSVV

SEQ ID NO: 4745 - protein, 1053 aa, Bradysia coprophila
MDSPPKLPNVAAVGRRKNVIPKKPPVSSNVNVNVLDSPPKLPNVAAAPKKPPVSSAAINAALLIATTKDRSSSPSNATAASNPAINITSHRNTTSSIIGSGRTGSTQEVAHPLPIRQSPPPMEYGSEWDTDGEATIAQLKQMQRKRPSKKAHSTSTKPEVKQTPVQSNRKRAASTDEASDAVEATTKRSTSTKRSKASKRSKATKTQQDSADEAGDADQETTKRSTSTKRSKASKRSKVTKTQQDSADEAGDADEATTKRSTSTKRSKASKAQQRKDDDENGNRAVIQTQLEEIIFLGNVFDKSIRRFTCPFATCNVNYSTFLNLKNHVKKTHEETLQKPIETDTNNWRRIQNANNRFDITTVKQKLRPLIIDGETIIKKQRVLEPLATEKTEVATKVFDIMNKQAVELSKLAILFSSLVYFDVYNTISDPENGNEIDRIFEEEFNWKEMILEFKQFQRNTAKAKKPRPAKHNTFFDLCRKYDVETYFTETSQNAWNSIVDTFATNFKTNITTHLYSRIRKWLAFKLRDGKKKKDVCGKENRKDINNKIYHTWDEKETFHTMHFPIDTKALFDILKNLPQFKAILNQAEFLELQIDDDPNRKTTNPFWYFLFNIQKMETATKKFGGRITTNGSDVSIQYCKLRKEKELTKAEILEMASNRKRKHDVIDSDSESESEDDDDDDDDDNAKTIKTDPAIVSALTNITNMEDLSVSGVDLGVRNVAATVIRKWSKSSDGYEVHESNVLHKSKDYHYKAGFARRQRKGKKLHGEFDERYQKDRQSQPIEPSQRSPDYIKFLNSRLKWFNEGTATYMQRVVTNVKFDKFRSTQKQMMAMAKEIVGDINVHDKATTQPSKIRVVFVGNCSTPANSTIKGHRRSPGNAPIVRYLKQIPQTYVDATIDEYCTTKKCSRCYETLDDVEFSKERLKLCHNCKLAENSTSTNLVSTYQRKQVIAEAMIPITEDYPKPTQFERAQRVAMERTKRWSFGDKMRMAARIKLKSTTYTVNTTATLKHLYWNRDGNAARNIMQLGLCQYNDCLPIEFNKDEAFQRPKKKD

SEQ ID NO: 4746 - protein, 1128 aa, Bradysia coprophila
MIKYLINQLTSGDVGDTDSASETNDNSEHNTATTTVTDSPPKLPNVAAVGRRKNVIPKKPPVSSNVNVNVLDSPPKLPNVAAAPKKPPVSSAAINAALLNATTKDRSSSPSNATAASNPAINITSHRNTTSSIIGSGRTGSTQEVAHPLPIRQSPPPMEYGSEWDTDGEATIAQLKQMQRKRPSKKAHSTSTKPEVKQTPVQSNRKRAASTDEASDAVEATTKRSTSTKRSKASKRSKATKTQQDSADEAGDADEETTKRSTSTKRSKASKRSKVTKTQQDSADEAGDADEATTKRSTSTKRSKASKAQQRKDDDENGNRAVIQTQLEEIIFLGNVFDKSIRRFTCPFATCNVNYSTFLNLKNHVKKTHEETLQKPIETDTNNWRRIQNANNRFDITTVKQKLRPLIIDGETIIKKQRVLEPLATEKTEVATKVFDIMNKQAVELSKLAILFSSLVYFDVYNTISDPENGNEIDRIFEEEFNWKEMILEFKQFQRNTAKAKKPRPDKHNTFFDLCRKYDVETYFTETSQNAWNSIVDTFATNFKTNITTHLYSRIRKWLAFKLRDGKKKKDVCGKENRKDINNKIYHTIKFLFDSEKCTQAEEVQHELICELQKICQFPNFNHGGRSYFERLRYDFKEDGDDDLGKPKRKRKCAAPKKTTKKSKKKKKKTQNNGPRLNWFQMVPAMAILNQAEFLELQIDDDPNRKTTNPFWYFLFNIQKMETATKKFGGRITTNGSDVSIQYCKLRKEKELTKAEILEMASNRKRKHDVIDSDSESESEDDDDDDNAKTIKTDPAIVSALTNITNMEDLSVSGVDLGVRNVAATVIRKWSKSSDGYEVHESNVLQKSKDYHYKAGFARRQRKGKKLHGEFDERYQLKWFNEGTATYMQRVVTNVKFDKFRSTQKQMMAMAKEIVGDINVHDKATTQPSKIRVVFVGNCSTPANSTIKGHRRSPGNAPIVRYLKQIPQTYVDATIDEYCTTKKCSRCYETLDDVEFSKERLKLCHNCKLAENSTSTNLVSTYQRKKVIAEAMIPITEDYPKPTQRAQRVAMERTKRWSFGDKMRMAARIKLKSTTYTVNTTATLKHLYWNRDGNAARNIMQLGLCQYNDCLPIEFNKDEAFQRPKKKD

SEQ ID NO: 4747 - protein, 327 aa, Bradysia coprophila
MSYGIEIETVAKRTSKSKKKRKFAQQLHSDGESVTILYESELKPVLNVENKIRKIKKNYAQDKYKYRTSIDVGFNTYIAAKRLTIETGKEVNLKLKSKHYHRGTRNNNRKKKFQRLVGDYERRAATDRESYAVMPTPTGPSYCIYVRHCLQFWTESIRVYTRAPYARMAFDKYVYSQKKIDSIVTLLTNKQPSLFLIGGAEFSPNSPIKGHVRCPGIRKFTQALIKYDNCDYLFVDEYNTSQHCGLRLSRFPTWTKKARYKRCENCPTAELAIPQAPVIITTPKRVYQRQRKSGNVGDKTRRYIKTALTPSTNQLALGYFGMLFDRL

SEQ ID NO: 4748 - protein, 520 aa, Bradysia coprophila
MEVFEADPTFIIDTEPDFRVMFAVLIEDGKGINRENTMEMVSNYMGMRTTHNVNGTRKYNGSHKTEAIEDLADTYKTCLANNITEHTYQHLRKFFKEIQPKIQSYDTLGYLFSYDEKHVPNNTLLNALQTELLVPPTRAYFASIHKDWYVHIPMLLRLQRWRNQRNLHNFRIFPIFHHRRRFIHFDTMALHQFLNSISKVKYEAVKHSKTYENNLWRHLFSIDKWLPAHEDNNRPDDYQGPRFHKSYRTDGVISLWFGEKNRFLMKNNFCRDISDRLASNDFDEIVALDPGGRLSFAGIRRDARTDAETTIKYSSSAYRYDSRQYATKNKYRQFTKQHAEQMQTARNQVQNKASRTADPTTYINFELEHFEVNCNVLMHKYLARLNFDRFVWRQRATARLGRQLAYGERYITDLQQQRRRERNRKWRYRKKRRQRIEINPNAPPDKYVTLHNTPIPPRVLLFAGDTDVSPFIKGYVKSPNRRIMKETSKFATVVQVNEFRSTMLCSRCFQPCVTAKSPHR

SEQ ID NO: 4749 - protein, 372 aa, Bradysia coprophila
MRLQKWRYSQGLRNFRVFPIMKQRRHFIPYEKTSFHKLLNSLHKFDYQKKFETEHHKFACNFRTDGVTVNIMMRRKKIPKIDNKEFLHAVGEQFANNEFEDIVAVDPGCRLSFAGIRKTGSVESNFRYGSTSYRYDSSQYRINRIYRRFTNDLQRKLQLERQTLPYNASSKADPEQFMNFILKNFDNTNDVMMAKFLAKLNLRRYVGKQRAIKKYVKLLTLGQERIDAIDMERKRLRRKNRKRKKLNYQTALNSTMQTVRKKRNETTDAIEPVRKRVLLFVGSTEIHPIIKGYVRSPSEAILREASKYAVIVRVHEHRSTMLCSTCFEPCITSKSPHRWQYCRPCNKTWNRDINGFRNIFYLGVHLVQGSFI

SEQ ID NO: 4750 - protein, 260 aa, Bradysia coprophila
MQKIMHAYFEWHVKNDTKSFRVFPILGKRRHYVQYDDQAYHQFLRNWRISSTHYDDFDENVLWRRYFKIDEVESDGHTFHNHIRTDGVSVSITMKRKKRSVADNAQRMTQANAKLKRHEIKNFRAYDPEKYNRLANPLLRKLQNDRETLPNKACAVLDFNEFINFELKHFCETNEVLMSQAITKLRFQRFISREKAITELAKALVGSRTATNTTIVFCGSTEQNPVIRGTAKQYLHTSDKPKPHTRLDTINQRRAMRQIC

SEQ ID NO: 4751 - protein, 536 aa, Mercenaria mercenaria
MMQDSNSRHSDDLENQTTMKRKRSLSPLTLWKAAHVFKHQNLECWFQFAKDGESHNKVFASDFERTKKQIKLEDEKPFLTTFSVGIRPTQNQKRVLNQMLRVSNHAYNWSNYLVREKNLKPKLYDLQTYVCRTNSSDVPMEFRMDTNDDWYFNNKMTQIKKAACKNFCTMYKSALTNQRKNKKYTKTVILKDKDDTNPSQGAFEIQKQYIRTLKETDSDDNDILHHCVSANADNFSTRRKNVNRFLLLSKPVRKLPPIEHAVKIVKTAKGKFVLKIPCDPKYTRSKWYEEPFDTMCGIDPGGRAFLTIYDPSKPQAFQIASRCKAPSKPVRKQTKKKGKKWHRKKKSQRRVRSIIEKIDGLHAKIDYVKSKMQAAIRRKQPQAKIDRQRQLQKVYYRLGNAIRWVHLRCTYNLMQYSYVAIGEIGIPSIIRRQCNGKRRHINKKSVRHLTVWNHCKFRERLVYRAKGTKTNVIVQDESYTSKTCSECGTINDKLGGSETFKCINPSCDYITNRDVNGAKNILRKSLGIGSIKTYRA

SEQ ID NO: 4752 - protein, 477 aa, Mercenaria mercenaria
MKRKREQMTLWKAAFVNGRETFKSWIDKARMLELNCDVSSASSTHYSDLNLKTKCAKMEDKFMCTFSVGIRPTSKQKRTLNQMLKVSNHAYNWCNYLVKEKDFKPKQFDLQRVVTKTNSHDVAAEYRLPGDDWSFDNKMSSIKLTACKNFCTMYKSAQTNQKKTKVDLRNKDTALLREGSFEVQKMFVRLLTEKDILDERIRQSRIALMPESFSKSKKDWKERFLRLSKKVSKIPPLSHDMKVCKRPNGKFVLQIPCDPKYTRRIQVHSSDSICSIDPGGRTFATCYDPSNIKAFQIGPETDKKEVIHKYHEKIDEVHRLLAYAQKKKQTQAVQDRIGQLKKHLKLKTYVHDVHLKLCSYLVKNYKLVVLGKISVSSIVRKDRPNHLAKSANRDLLCWQHFRFRQRLLHRVRGKDCEAIAQDERYTSKTCGNCGVKNNKLGGKETFICESCNYKTHRDVNGARNILCKYLGLFPFAA

SEQ ID NO: 4753 - protein, 270 aa, Mercenaria mercenaria
MPESFSKSKKDWKERFLRLSKNVSRIPPLSHDLKEYKRPNGKFVLQIPCDPICKRQIQVQTSDSICSIDPGGRTFATCYDPSNLTAFPTGPKEDKINVIHEFHDKINWVHHLLSCAQKKKQMQAIQDRIEQLKKLHLKLKTYVDDVHLKLCSYLVKNFKLVVLGKISVSSIVRKDRPNHLAKNGNRDLLCWQHFRFRQRLLHRVRGTDCEAIAQDERYTSKTCGNCGVQNNKLGGNETFYYKSCNYKTHRDVNGARNIPCKYFGHFPFAT

SEQ ID NO: 4754 - protein, 519 aa, Mercenaria mercenaria
MNRKRSLSPLTLWKAAHVFKHQNLECWFQFAKDGESHNKVFASDFERTRKRAKLEDEKPFLTTFSVGIRPTRNQKRVLNEMLRVSNHAYNWSNYLVREKNLKPKQYDLQTHVCKTNSSDIPMEFRMDANDDWYFDNKMTTIKTAACKNFCTMYKSALTNQKKKKKYIKTVTLKDKDDMNPSQGAFEIQKQFIRTLKETDTDDNDTLHHCIAAMPDNFTTRRKDVRNRFLRLSKPVSKLPPLEHAVKIVKTAKGKFVLHIPCDPNYTRSKRYDEPFDSMCGIDPGGRTFLTIYDPSKPRAFQIASRCKAPSKPVRKRTKKKGKKWHRKKKSQRRVGSTIDKIDGLHAKIDYVNSKMQAAIRRKQPQAKEDRQRQLQKVYYQLGNAIRWVHLRCTYNLMQYSYVAIGEIGIPSIIRRQCDGKRRRINKKSVRHLTVWNHYKFRERLLHRAKGTKTNIIIQEESYTSKTCSECGTINNKLGGSETFKCTNPACDYITNRDVNGAKNILRKSLGIGSIKTYRP

SEQ ID NO: 4755 - protein, 519 aa, Mercenaria mercenaria
MNRKRSLSPLTLWKAAHVFKHQNLECLFQFAKDGESHNKVFASDFERTRKRAKLEDEKPFLTTFSVGIRPTRNQKRVLNEMLRVSNHAYNWSNYLVREKNLKPKQYDLQTHVCKTNSSDVPMEFRMDANDDWYFDNKMTTIKTAACKNFCTMYKSALTNQKKKKKYIKTVTLKDKDDMNPSQGAFEIQKQFIRTLKETDTDDNDTLHHCIAAMPDNFTTRRKDVRNRFLRLSKPVSKLPPLEHAVKIVKTAKGKFVLHIPCDPNYTRSKRYDEPFDSMCGIDPGGRTFLTIYDPSKPRAFQIASRCKAPSKPVRKRTKKKGKKWHRKKKSQRRVGSTIDKIDSLHAKIDYVNSKMQAAIRRKQPQAKEDRQRQLQKVYYQLGNAIRWVHLRCTYNLMQYSYVAIGEIGIPSIIRRQCDGKRRRINKKSVRHLTVWNHYKFRERLLHRAKGTKTNIIIQEESYTSKTCSECGTINNKLGGSETFKCTNPACDYITNRDVNGAKNILRKSLGIGSIKTYRP

SEQ ID NO: 4756 - protein, 519 aa, Mercenaria mercenaria
MNRKRSLSPLTLWKAAHVFKHQNLECWFQFAKDGESHNKVFASDFERTRKRAKLEDEKPFMTTFSVGIRPTRNQKRVLNEMLRVSNHAYNWSNYLVREKNLKPNQYDLQTHVCKTNSSDVPMDFRMNNDDDWYFDNKMTSIKQTACKNFCTMYKSALTNQKKKKKYIKTVTLKDKDDMNPSQGAFEIQKQFIRTLKETDTDDNDILHHCIAAMPDNFTTRRKDVRNRFLRLSKPVSKLPPLEHAVKIVKTAKGKFVLHIPCDPTYTRSKRYDEPFDSMCGIDPGGRTFLTIYDPSKPRAFQIASRCKAPSKPVRKRTKKKGEKWHRKKKSQRRVGSTIDKIDGLHAKIDYVNSKMQAAIRRRQPQAKEDRQRQLQKVYNQLGNVIRWVHLRCTYNLMQYSYVAIGEIGIPSIIRRQCNGKRRRINKKSVRHLTVWNHCKFRERLVYRAKGTKTNVIVQDESYTSKTCSECGTINDKLGGSETFKCINPSCDYITNRDVNGAKNILRKSLGIGSIKTYRA

SEQ ID NO: 4757 - protein, 459 aa, Mercenaria mercenaria
MMQDSNGRHSDNLETTTKTKNNICENWLLTLIKAACCLRSKQTTTRNRKRSLSPLKLWKAAHVFKHQNLECWLQFAKDGEAHNKVFASDFERTRKQVKLEDEKPFMTTFSVGIRPIRNRKRVLNEMLRVSNHAYNWSNYLVREKNLKPNPYELQKYVCKTNSSDVQNDFRMENNDDWYFDNKMTTLKTAACKYFCTMYKSALTNQKKKKKYIKSVSLKDKDDINPSQVDFEIQKQFIRTLKETDTDDNDILRHCVSAIANNFTTRRMKKKSQRRVRSIIDKIDGLHAKIDYVNSKMQPAIRRNQPQAKDDRQRQLQKVYYQLGNANRWVHLRCTYNLMQYSYVAIGKIGIPSIIRKQCNGKRRRINKKSVGHLTVWNHCKFRERLVYRAKGTKTNIIQDERYTSKTCSECGTINKKLGGGETFKCTNPACDYITNRDVNGAKNILRKSLGIGSIATYRA

SEQ ID NO: 4758 - protein, 307 aa, Mercenaria mercenaria
MPDNFTTRKKDTRNRFLRLSKSVSKLPPIEHAIKIVKTAKGKFVLQIPCDPKYTRSKQYDEPFDSMCGIDPGGRTFLTIYDPSKPRAFQIASRCKAPTKPIREKVKKKGKTWRRKKKSQRRVGSIIDKIDGLHAKIDYVNSKMQAAIRRKQPQAKEDRQRQLQKVYYQLGNAIRWVHLRCTYNLMQYSYVAIGKIGIPSIIRRQCNGKRRCINKKSVRHLTVWNHCKFRERLVYRAKGTKTNVIVQEESYTSKTCSECGTINHKLGGSETFKCINTSCDYITNRDVNGAKNILRKSLGIGSIATYRA

SEQ ID NO: 4759 - protein, 342 aa, Mercenaria mercenaria
MLNVSNYAYNWCNYLVKEKNFKTKQFDLQRIVAKTNSHDVSDEYRLSGDDWFFENKMSSIKLTACKNFCTMYKSAQTNQKKTKVDLRNKDIAQLREGSFELQKLFVRLLTEKDIPDERIRQSRIALMPDIFSKSKKDWKERFLRLSKKVSKIPPLSHDMKIGPETDKKRVIYEFHDKINWVHHLLSCAQKKKQTQAVQDRIGQLKKLHLKLKTHVDDVHLKLCSYLVKNYKVVVLGKISVSSMLRKDRPNHLAKKGNSDLLCWQHYRFRQRLLHRVRGTDCEAIAEDERYTSKTCGNCGVQNNKLGGNEKFHCKSCNYRTHRDVNGARNILCKYLGHFPFAT

SEQ ID NO: 4760 - protein, 519 aa, Mercenaria mercenaria
MNRKRSLSPLTLWKAAHVFKHQNLECWFQFAKDGESHNKVFASDFERTRKRAKLEDEKPFLTTFSVGIRPTRNQKRVLNEMLRVSNHAYNWSNYLVREKNLKPKQYDLQTHVCKTNSSDIPMEFRMDANDDWYFDNKMTTIKTAACKNFCTMYKSALTNQKKKKKYIKTVTLKDKDDMNPSQGAFEIQKQFIRTLKETDTDDNDTLHHCIAAMPDNFTTRRKDVRNRFLRLSKPVSKLPPLEHAVKIVKTAKGKFVLHIPCDPNYTRSKRYDEPFDSMCGIDPGGRTFLTIYDPSKPRAFQIASRCKAPSKPVRKRTKKKGKKWHRKKKSQRRVGSTIDKIDSLHAKIDYVNSKMQAAIRRKQPQAKEDRQRQLQKVYYQLGNAIRWVHLRCTYNLMQYSYVAIGEIGIPSIIRRQCDGKRRRINKKSVRHLTVWNHYKFRERLLHRAKGTKTNIIIQEESYTSKTCSECGTINNKLGGSETFKCTNPACDYITNRDVNGAKNILRKSLGIGSIKTYRP

SEQ ID NO: 4761 - protein, 497 aa, Pythium ultimum
MLVWMEKFVDKHPKTKGARVYSLLPVATTFQAAYVKLNASTLHGPLARLIDLPEVEDFLKKELSIVPTRKRTGSQLPFDKKTFQKNRSEVIRKVFDVEQFETLDRKFADEIKTNGYGTSITMTRSVTTVSVALVEKKASKKKRMKNDGTAELVSKEKTARKKKVKTPEEIAEEDTFAKELFKLGPDYSPNVLIGIDPGMRSLATAVSVGHLQRRRRRQKSRRGLHRRHQTRRVRRKERVIEISTPEYRHLARMNDFRFYNENLKMREPWHAGVIRAMPSFKISSYDLYFQHLQFFWKHLRFLLVFSAEQAFLCWRFTQDRAKTKALDTLAKRIVPKANKQVCIAYGDWSRRDGLKGHASGPVKGFVEALKRRATVIPMDEYRTSITCSCCHQRLKQTRLFTKMKRKEDEVDIRQKEQPSKKEVKEIVEMAKFKNLKLADKKVVLKCTRNVLRCTNSKCKANFWNRDVNAARNMLELLKSGLEEKHGARRLRAFRRGQ

SEQ ID NO: 4762 - protein, 630 aa, Pythium ultimum
MGRKRKKDDCPEEWDVVDETQDPDAIPPLFEIVAEMQDSDAEVDVVTNALSQLPPPSQKSLAPPTNRIKETTKEINSSVICKLTRICKFPLLVGEIKKVCVAMKQVQLEGWHLANLHILRCLKEGDEVPKIEQMFFYQCCTATLGNIEKRDRGSTESKYPAFHKTCLRCWAGRERESTYEPEFIQTAGDMVSEMAKLMEINALNMIALHFRQRLHQYIQFRYAKKGDTKLKYRETRRLVDSCYRVKSEPEKDDEGNPTGKTAKVWTEWDDTDDPVEQELREWLGIAPWQWQIRANPAHFLHKLYDMLVWMEKFVDKHPKTKGARVYSLLPVATTFQAASRHSIASKKKHMKNDGTAELVSKEKTARKKKVKMLEEIAEEDTFAKELFKLGPDYSPNVLIGIDPGMRSLATAVSMREPWHAGVIRAMPSFKTSSYDLYFQRLQFFWKHLRFLLVFSAEQAFLRWRFTQDRAKMKALDTLAKRIMPKANKQVCITYGDWSRRDGIKGHASGPVKGFVEALKRRATVIPMDEYRTRITCSCCHQRLKHPTERAASKKEVEEIVEMAKFKNPKLADKKVVLKCTRNVLRCTNSKCKANFWNRDVNAVRNMLELLKSGLKEKHGARRLRAFRRGQ

SEQ ID NO: 4763 - protein, 201 aa, Pythium ultimum
MTRHLALFGLVTCLLDLLKQLPTLQISSFEDYLNQLQVAWKHLGLLGDFSTKHTFRKWRFYQTRFRQKALHGISRQLVPTPDPKVCVAIGNWRSQTCLRGHAHGPVKCLTRELEKRATVLVVDEYRTSKRWSRCLHELCNKTYPVVGEDSSVSRKRSYAVLCCSNLDCGTTWDRDMNGAINTSQLAVRMRLGFPRSPELSR

SEQ ID NO: 4764 - protein, 201 aa, Pythium ultimum
MGMRRALFGLVTCLLDLLKQLPTLQISSFEDYLNQLQVAWKHLGLLGDFSTKHTFRKWRFYQTRFRQKALHGISRQLVPTPDPKVCVAIGNWRSQTCLRGHAHGPVKCLTRELEKRATVLVVDEYRTSKRWSRCLHELCNKTYPVVGEDSSVSRKRSYAVLCCSNLDCGTTWDRDMNGAINTSQLAVRMRLGFPRSPELSR

SEQ ID NO: 4765 - protein, 201 aa, Pythium ultimum
MADAVALFGLVTCLLDLLKQLPTLQISSFEDYLNQLQVAWKHLGLLGDFSTKHTFRKWRFYQTRFRQKALHGISRQLVPTPDPKVCVAIGNWRSQTCLRGHAHGPVKCLTRELEKRATVLVVDEYRTSKRWSRCLHELCNKTYPVVGEDSSVSRKRSYAVLCCSNLDCGTTWDRDMNGAINTSQLAVRMRLGFPRSPELSR

SEQ ID NO: 4766 - protein, 402 aa, Pythium ultimum
MLVWMEKFGDKHPKTKGARVYSLLPVATTFQAAYVKLNASTLHGLLARLIDLPEVEDFLKRELNIVPTRKRTGSQLPFDKKTFQKNRSEVIRKVFDVEQFKTLDRKFADEIKTNGYGASITMIRPVTTVSVALVEKKASKKKRMKNDGTAELVSKEKTARKKKVKTPEEIAEEDTFAKELFKLGPDYSPNVLIGIDPGMRSLATAVSVGHLQRRRRRQKSRRGLHRRHRTRRARRKERVIEISTPEYRHLARMNDFRFYNENLKMREPWYAGVIRAMPSFKTSSYDLYFQRLQFFWKHLRFLLVFSAEQAFLRWRFMQDRAKMKALDTLAKRIVPKANKQVCIAYGDWSRRDGIKGHALGPVKGFAEALKRRATVIPMDEYRRASRALAATSASSKLVCSPR

SEQ ID NO: 4767 - protein, 622 aa, Pythium ultimum
MKSAGKRKRRRKPETDDEQEDLPATVIEEKQKRRRPDVIARRVANADTAVSVVKTTLNSFCKEEGKALSWESVLRDMNKAVLEAYVLANIHVVRLRQASLPIEPLNQNFFHRCMTAVSSGIRESQDCEQLKQSVALYNEWRASDVSRANIEYVARGWQQNAAKMMATNATNAINLNFYRRFHKFLKRKYGFNGRQAYATLKSILDPKYKEEDPIVIEWRARIPRKHDGKLDCKPHPLTLTYMFLSDIEERNQVNKTTPDYVEIRSFSLLPYKRGFECSHFKVCKTGLRALLKRARVDVPYEGAGWNEVADNWWRVFFHIDKFETANRKFDGEIVTDGKSVSIVMRKPKRESVTSELNAKDYDVVWGLDPGRTDLFVATNQYGEKIKCSSREFYDHARYKKRNQKIKIWQENRPAVLEVIRNMPTKKTAQLERLKEYVKFMIPRMDLLLKFAMVKPFRKLKLRSYIFAQKKLRELCLKLTAQGGRRTIVGFGDWSNQDIGGLIKKCPAGPVKPLERMLRKYCRVESIDEFRTSKLHNDCHRSLDHQYSKRKCRDGKERTLKVHGVLHCKNNGCHGMTVNRDVNASKNMLLLLQLKMRGEDRPPAFCRASTQEEEQQVSTSAVS

SEQ ID NO: 4768 - protein, 802 aa, Pythium ultimum
MVRKRKKDDYPEEWDVVDETQDPDAIPPLFEIVAETQDSDAEVDVVTNALSQLPPPSQKSLAPPTYRIKETTKEINSSVICKLTRICKFPLLVGEIKKVCIAMKQVQLEGWHLANLHVLRCLKEGDEVPKIEQMFFYRCCTATLGNIEKRDRGSTESKYPAFHKTCLRYWAGRERESTYEPEFIQTAGDMVNEMAKLMEINALNMIALHFRQRLHQYIQFRYAKKGDTKLKYRETRRLVDSCYRVKSEPEKGDEGNPTGKTAKVWTEWDDTDDPVEQELREWLGIAPWQWQIRANPAHFLHKLYDMLVWMEKFVDKHRKTKGARVYSLLPVATTFQAAYVKLNASTLHGLLARLIDLSEVEDFLKKELNIVPTRKRTGSQLPFDKKTFQKNRSEVIRKVFDVEQFETLDRKFADEIKTNGYGASITMIRPVTTVSVALVEKKASKKKRMKNDGTAELVSKEKAARKKKVKTPEEIAEEDTFAKELFKLGPDYSPNVLIGIDPGMRSLATAVSVGRLQRRRRRQKSRRGLHRRHRTRRARRKERVIEISTPKYRHLARMNDFRFYNENLKMREPWYAGVMRAMPSFKTSSYDLYFQRLQFFWKHLQFLLVFSAEQAFLRWRFTQDRAKMKALDTLAKRIVPKANKQVCIAYGDWSRRNGIKGHASGPVKGFVEALKRRATVIPMDEYRTSITCSCCHQRLKQARLFTKMKRKEDEVDILQKERPSKKEMKEIVEMAKFKNPKLADKKVVLKCTRNVLRCTNSKCKANFWNRDVNAARNMLELLKSGLKEKHGARRLRAFRRGQ

SEQ ID NO: 4769 - protein, 802 aa, Pythium ultimum
MVRKRKKDDYPEEWDVVDETQDPDAIPPLFEIVAETQDSDAEVDVVTNALSQLPPPSQKSLAPPTYRIKETTKEINSSVICKLTRICKFPLLVGEIKKVCIAMKQVQLEGWHLANLHVLRCLKEGDEVPKIEQMFFYRCCTATLGNIEKRDRGSTESKYPAFHKTCLRYWAGRERESTYEPEFIQTAGDMVNEMAKLMEINALNMIALHFRQRLHQYIQFRYAKKGDTKLKYRETRRLVDSCYRVKSEPEKGDEGNPTGKTAKVWTEWDDTDDPVEQELREWLGIAPWQWQIRANPAHFLHKLYDMLVWMEKFGDKHPKTKGARVYSLLPVATTFQAAYVKLNASTLHGLLARLIDLSEVEDFLKKELNIVPTRKRTGSQLPFDKKTFQKNRSEVIRKVFDVEQFETLDRKFADEIKTNGYGASITMIRPVTTVSVALVEKKASKKKRMKNDGTAELVSKEKAARKKKVKTPEEIAEEDTFAKELFKLGPDYSPNVLIGIDPGMRSLATAVSVGRLQRRRRRQKSRRGLHRRHRTRRARRKERVIEISTPKYRHLARMNDFRFYNENLKMREPWYAGVMHAMPSFKTSSYDLYFQRLQFFWKHLQFLLVFSAEQAFLRWRFTQDRAKMKALDTLAKRIVPKANKQVCIAYGDWSRRNGIKGHASGPVKGFVEALKRRATVIPMDEYRTSITCSCCHQRLKQARLFTKMKRKEDEVDILQKERPSKKEMKEIVEMAKFKNPKLADKKVVLKCTRNVLRCTNSKCKANFWNRDVNAARNMLELLKSGLKEKHGARRLRAFRRGQ

SEQ ID NO: 4770 - protein, 671 aa, Pythium ultimum
MGRKRKKDDYPEEWDVVDETQDPDAIPPLFEIVAETQNSDAEVDVVTNTLSQLPPPSQKSLAPPTYRIKETTKEINSSVICKLTRICKFPLLVGEIKKVCVAMKQVQLEGWHLANLHVLRCLKEGDEVPKIEQMSFYRCCTATLGNIEKRDRGSTESKYPAFHKTCLRYWAGRERESTYEPEFIQTAGDMVNEMAKLMEINALNMIALHFRQRLHQYIQFRYAKKGDTKLKYRETRRLMDSCYRVKSEPEKDDEGNPTGKTAKVWTEWDDPDDPVEQELREWLGIAPWQWQIRANPAHFLHKLYDMLVWMEKFVDKHPKTKGARVYSLLPVAATFQAAYVKLNASTLHSLLARLIDLPEVEDFLKKELNIVPTRKRTGSQLPFDKKTFPKNRSEVIRKVFDVEQFETLDRKFADEIKTNGYGVSITMIRPVTTVSVALVEKKASKKKCMKNDGTAELVSKEKTARKKKVKAPEEIAEEDTFAKELFKLEPDYSPNALIGIDPGMRSLGTAVSVGHLQRRRRRQKSRRGLHRRHRTRRARRKERVIEISTPKYRHLTRMNDFRFYNENLKMREPWYAGVIRAMPSFKISSYDLYFQRLQFFWKHLRFLLVFSAEQAFLRSRFTQDRAKMKALDTLAKCIVPEANKQVCIAYGDWSRRNGIKGHASGPVKGFV

SEQ ID NO: 4771 - protein, 671 aa, Pythium ultimum
MKQIQLEAWHLVNLHTLRCLENGLPLPDYSNKTFFDHCCAGVSTTNKTHHIAQKNPDLWESIKIYQSQRERAGLSEVTHLIGYGDLKYELREQMVVNAGVMIREHFRTRLRLYVDITFGGLGDTLTKKQKKEKADLVKAIMHACYSVDETDVVEALQMRDILTPDGVGWSEQWIPWPDRIKENGMAFYVRLLWEFQDVVEKRMEAVPNEKGVQAFSLFPVSTNYSRAHIKINGTTLAGFYSRIQQRVPEYRWDLPSVSLSVRSFKENRWTVMRRAFDIAQFETRLSECPLSKAEFAQLSVEEKYEHASHLFANQVTTDGYSASVLMYRPMTEEEKADKESEKKYEEKADKGPVVPPGYVPNVMIGLDPGMRAICTAVREDFRPESQGDRPPRRRGRRQPRRSHRRRRSTRKKKSDRPHWIKRPKAPRHRNGRDIVSVTTREYRHLAGFNRCRVWNEGQKKRHPEYQAIITKMPSFKTASYETYLERLEYFWRHVRFLMQFCVDRPFLKWKFFRKRMARVAVDEIARRIVPTVSRQTCVAYGNWSRHKGIKGHAPSPVKGLKEALRKRATVVSMDEFRTSKLCSQCHQPLSSVSYSVNTMLPKRKKRKGMVLARNRAEIEFEEKECYAVLRCDHKDCEARYWDRDVNAAINMLELLKSEVLGLGRMEAFQRP

SEQ ID NO: 4772 - protein, 563 aa, Pythium ultimum
MKYELRQQMVANAGVMLREHFRRRLCAYVKVVYPNAKEKDVLHGCYNSEPTKLEEVQEMRALLTPDGVSWCEEWIPWPNRITDDSKIEFYIRLLWKFQRVIEDHIEANPGRSTKGVRAFSLFPVATSYTASHIKINATTLAGLCSRVKKKDPETGGDCSITKWWGVDHIKIDHNAFAAEKWTVMRKAFDIDAFETLRPDTDVSQADFRHMTVEEKYAHASHLFANQVTTDGYGASVLLFRTKNELDEAEKQQSERLVPEGYRPEVVIGLDPGMRSVCTAVRERFVPGQIKRVRRRSVRKKRRRKRSWIRRYDGPKRKNGRDIVEVHAKEYRHLAGFRKRRTWEEVLKNSNPEYGTAIRGMPSFKTSRYKVYLERLHYFWKHAGFLLEICWRKPFLKWKFFNKRSSRIAVDALAARIVPDPSVQTCIAYGNWSRRDGIKGHASSPVKSLQQALAKRAKVVILDEFKTSKLCSTCHRELSPVSYLVNPDLDKRRKRAGKIISRYHSEERKLVECHAVLRCDQKKCEASYWNRDVNAAINIVNLLKYEIEHGGRMAAFARVQDRRD

SEQ ID NO: 4773 - protein, 871 aa, Allomyces macrogynus
MADTTLPVDAVPSDAAPVAEPILPAPVEDVAPGLAPSVPALSAVAPSDQARAPIVSVVPQTLHHALVDAPEYLAVRAVIEARSERLVNAHGFAATEATLYLRYRARRAYEDFRDALLYAEEDYESSNDMVSLLKAVTVADQQADYLVFGIPNCDQLDQYATEYLHHVHYPNTPFVNRSFFTRSFEYLFQEIVKNGSEHFHRTFRYAAGRCINPFAVLVESWPPPAPPRDQRAVEPPANRRMRRDFYAAIDKWVTTICRRGSKLQLDKFLYKCACIIVDYNLFILQNPEYARATSGLVPDLGVLHVPVPFVPPPPAAADDEAQGQVEQQDSVHLPRFIPEGVRIAAETLPRNRHARRKQGKAWIAPAVADHFAVARRWFCPDLTIFPHMALKRRHVRLDSMDITRGLLAEFPGNSPDLLHVVFGLIMKHAHLDSLVPGASDLNVPDEQYELALEQYAWQKLRDISPQLARLRTKFCSDPSISPVLSGYWQKPRVDGAPRVGSSFTTNGYAAHILISRVPTDDDVRRVGGEGEIKQKSTRRVVTRGPGRAVAAKSLHSRLGTGEFAAIKSRSLIVSDYPKGLIAVDPGQSTLMTKTTLTPFRVGAFANGWINIKWEITRRRNPGYKSWSIPGPRWSAATGQRNQTLQILRLRQHQSDLEQIESRLPAVHDPTLAGIIVLAKAVTTNMERILGFKMDRRYAKYDLQATIAKQRALAYLRNKFTGYGVLFGNKGAVQINRVTRMPVKGVIRYLLVYGIDVLLVDEHRTSKFCAVCGSEFEATPAMKVNRKFAYRYLHCPSCKYVVNRDVNASWNMFRVALRDVFDIYVADSMLKHPLALLPSRGAPRPLLPQPGDDDFDDSAHDRYSGNHGGPGG

SEQ ID NO: 4774 - protein, 644 aa, Coccomyxa sp.
MRRPKKPPKDPQLRLQEQYLVYAKNKLFKEKKVKEKAVREDVKERAVTNAHSTFTVVKTTWRSLCKRAARLLDLETALREVNTTIAEAYLLANVHVVRLCTAGIPLCKLNQSFFYQCLSAVSVSEREKPEIEDFELRMSVKLYRSWRPQGYQPPDSTNLSSGFHQQASRQMATNMRNSTVANFYRRFKRYLKLRYSLDGKQAYEALLAIRAAEYEGEDPLVKRYRDMLPPKPEKSRLEDNPELVMPLQHHFLRAFEAAQADQQAEKPPRLFSLVPTKQGFECSHIKICSSGLYGLLRRSGIKDLPSSKGFPGKADAFWRRFFHISKFETTNRRFAGEILTDGKGVSIVLRKPKVEPAAKGAPLDPDTFGEVWGLDPGRREMFVASNDAQRVQRVTTRQFYHDAKYRESNAKIRVWQDHDPDILEAIRNMPSKKHSHLEGLQAYVSYLLPMLDFLLRWHMCKAFRDLKFKRYVFAKKVLRTICQNLTREAGQNTLVGFGDWSNQDSAGIIKKSPAGPVKRLENELRRHCRVVSVDEHLTSKLHSCCHHRMKQMYQRRVCRDGVMRSVKVHSVLHCDNNGCHGMTVNRDVNASRNILHILRATAGGGPRPEAFHRSRTKYSEAPATSGLPLNGQSTLALLPVPDSH

SEQ ID NO: 4775 - protein, 366 aa, Arabis nordmanniana
MKTLKLRIRDKHASQLNILAGSVNFVWNYVNELSFKHLKRTGKFFSAYDLATYTKGSGEYLNLHSQTLQAVTETHAKARKQFKKAKLNWRTNNPKAKRRSLGWIPFKKTAIKHISTRQSGRKSLKSTLQFSLAKGKKLTIDLWDSYNLSLYSINTCELVQDNSGHWYACVTVKEFPKTACGTGQVGIDLGCKESAVTSNGDVLTTKLTHKYAERLAIAQRAKHKKRVKAIHAKIKNTRLDLIHKFTSKLVKANNLIVIGKIKSTSFTSTNLAKSVYDAGWFEIKRQLDYKCKNAGCHYIEVNEAYTTQTCSCCGSRQDSPKGRADLGIRVWFCSSCQTVHQRDVNGAKNILAVGLDRLYIIIAQNL

SEQ ID NO: 4776 - protein, 419 aa, Tilletia indica
MADPPPAPWIGSVAPESVLWPGVEDTQQAAEWYNAPIDSWFLPKFAHLPHPVVPDENIGGMLTQLSATLRQRLDAVPPPPPPRRTRPGERQDNSRLKTYRTRLRPNTQQKEALRKTAGIVRWTYNRAVAYLKAHPNASFHDVREHSVTEDGLPLMNLSWVTPVPYSIREQACFDAHTALRNGLADVRAGKIPNFELKFRKKRALFSSFRIRTRDWDGGCLKIPNFGLGPGQHQTRIQTGIEVPSLEHDGACIKQENGSWFLLWQKDMGEEKMRVPAARGPEMCAIDPGVRTFATVYDPLRGMAAKFGDGDHKRLFRLGTHLDDLISRSTQASAKKRYRMRRAANRLRARIRNLVDELHWKLRSYLKRGFDTVLLPKFNAHQMSRRGQRRIGRNTVRAMMTWAHGRFRSRLNEAMEVPFS

SEQ ID NO: 4777 - protein, 458 aa, Phytophthora plurivora
MLTWMEKFVKEHPKTKGTRLYSLLPYSTSYANCYIMVNGTTLRGICTRIFKRTGWKLDWIPLAPRGGLVLTSFFQQNRSSLLREIFNVAQFETRVPDCSVTRVEFDAMDHETKKTYASRYFADQVSTNGYGASVLLTHPKDVNEFPEESNDKVLMDSRDPFEKARKCLPTGYSPDVMIGIDPGMRTLCTAVSVGRLPRRRARRKWLKERRRRKRKRLNRQYRRGQKITEISTGEYRHMSKMNHFRAWNERLKKREPWYASVVHAMPSFKTASYEQYVNGLSFFWMHLRFLLAFYAENPFLKWRFTQDRLKAKALDALAKRIVPKPGPQVCIGYGDWSRRDGIKGHAMGPVKGFVKALKKRATVLPMDEFRTSKLCSCCHKCLKQTPLFTKVRQEKDEGKKKIDFKIVLKSNRNVLRCENSRCEANFWNRDVNAARNMLELMKGYFQNLGRMTAFVRGG

SEQ ID NO: 4778 - protein, 421 aa, Dunaliella salina
MESTEKGNTKKRGKVNQTWKLPANKCRKIKITPSHEVANQLKRWFGSVRVTYNWTLECVKKKPDVHKCTNMISLRKRFINACNIPKEKGFLLDTPKHVRDTAIKDLTEAYKSNFAKRKLNPSHTFDLKFRSKKDTQSITIPSSVIKEFVLRDGKQNGDFSMYPTYLKNKVKFHVRKNRCNIPDIENDCKLVLDKLGRFYLAIPFYEPACENQASYNKKEWCAIDPGVRTMLTIYSPTLGECYKIGDQDISKIFRLCKHLDPAGSGADKLIGKKTIKKTRKEKALTRLKMKIKNLVTEVHCKAIAFLIKNFSNIIIPPFNVSQMVKKGERKLNKKSVRSMLTWRHYEFKQHLKERALQCGVKVYERSEEYTSKTCTHCLIIKENLGGAKVYKCDNCHLKADRDVCGARNIFIKNALECGRRF

SEQ ID NO: 4779 - protein, 415 aa, Dunaliella salina
MEGSTEKGNTKKKGKVSQRKKLPANKCKKIKITPSLELVNQLKKWFGSVRVTYNWTLECVKKKPYVHKCTNMISLRKRFINSCNIPKEKGFLLDTPKHVRDTAIKDLTEAYKSNFAKRKLNPSHTFDLKFRSKKDTQSITIPSSVIKGFVLRDDKQNGDFSMYPTYLKNKIKFHVRKNRCNIPNIENDCKLVLDKLGRFYLAIPFYEPACENQASCNKKEWCAIDPGVRTMLTIYSPTLGECYKIGDQDISKIFRLCKHLDKLIGMKTIKKTRKEKSMTRLKMKIKNLVTEVHCKAITFLLKNFSNIIIPPFNVSQMVKKDERKLNKKSVRSMLTWRHYEFKQRLKEKALQYGVNVYERGEEYTSKTCTHCLMMKENLGGSKVYNCDHCHLKVDRDVCGARNIFIKNALECGRYY

SEQ ID NO: 4780 - protein, 361 aa, Phytophthora nicotianae
MEAVPNEKGMTVEAKYNYASHLFANEIKTDGYNASILYYRPKKDEPKRGEDDLLVSAGYLPDVVIGPDPGMRSVCTAARQYLRPQAPRRPKQRRVRRPRRQKKKNKKRKRNFPKWIRRPKALRLGQRPGREIVSVTTREYRHLAGFNRFRAWNKSQKRKFPEYKKVFDGMPSFKTASYEQYLKRLEYFWQHATYLVQFWKDRPYLKWRFFQKRMARVAVDTLARRIVPTPKRWHQGPRSEPGQEVERGTAEARDGGFHGRVQTSKLCSQCRQSLSSVQYPTPVFPKNGDKPKRKKVKGKVLPRDWSQAGIQSRHCRVVLLCENKICQARYWDRDVNATINMLELLKSEVQGRGRIQPFKCS

SEQ ID NO: 4781 - protein, 298 aa, Phytophthora nicotianae
MYNMTTGTSFSISRSLFAGEIVTDGKVVSIMMRKPKKEAGPARTYTEKDFDVVWGLDPGRRDMFVATNQFEESVSCSSKEFYEEARYTKAKQKIKGWQDRHPKVLEAIRNMRTKKTASPEKLKVYIAFMTQRMDLLLRSSQLKPFRRLRFRIFLFMTKKLRQLCERLTPRGKRVVVGFGDWSNQDVAGIIKKSPAGPVKVFERELARYCTVIPIAEYRTSKVHFECQRQLKNQYSQRLCRDGEIRTQKVHSVLHCLNNGCRGMTVNRDVNASRNMRRLLECKLRGQDRPLAYTRQARA

SEQ ID NO: 4782 - protein, 637 aa, Phytophthora nicotianae
MRRKRKKDDYPKDWDVVEESQDPDEYPPRVTRPDVIARRARNKIMGCVAVKTSLNTFCKRGGRFLPGRALPWEEVLADMNKGVLEAYLLANLHILRLLKENKEIPKLDGGFFRSCLSAVMKLLRYSKVKGELGESLKIYNSSRCARSPQANGGYINQGRSHNAGYQMATMTKNALSMNFYRRFHKFLKRTYTIDGKKAYTLLKGILSHEEYVRTGTRFDEIVLEWRAKVPRKPNGYLADEAHQLIPLTYLLLQDIEDRNTHGKDAIDEGELFQEIRVFSILPTKKGFQCSHMKMCQLGLWGLLKRAGFAAPKPGKGWEDVQHDYLHKLFNLKKFETETRKFAGEIVTDGKAVSIMMRKPKKEAGPARTYTEKDFDVVWGLDPGQRDMFVATNQFEESVSCSSKEFYEEARYTKAKQKIKGWQDRHPKVLEAIRNMPTKKTASLEKLKVYIAFMTQHMDLLLGFSQLKPFRRLRFRSFLFMKKKLRQLCERLAPRGKRVVVGFGDWSNQDVAGIIKKSPAGPVKVFERELARYCTVIPIAEFRTSKVHFECQRRLKNQYSQRLCRDGEIRTQKVHSVLHCLNNGCRGMTVNRNVNASRNMRRLLECKLRRPSLGLHSSGKSVITKKVLLSACGWPRSS

SEQ ID NO: 4783 - protein, 365 aa, Phytophthora nicotianae
MCRMHKQRGISTSRKSPRRSASMYPEGMEPPPQWAFETPKNFRFNALRKFESGVESTFSNLENGNISKFKFQFKSRKKDGRYFTFCEDAGNAKITYMDGAPRAMLSISKLKDIPIRCDRSIEIANEIQIMNTNGFWYAIIPQYVRPGDYVNRGRTIALDPGMKAFMTGVDLEGNAKNIGRGNKEHLDKYRARIQNAQQEMSTIKNFQGHRSGRQWRAFARAKRAFHCATAKLSNCVKEMHYQTSAYLTKHYDTIILPVFNSKDMVKKSSARNHTFNRLLLGLKHFQFRKLLQAKCELMGKSLVVCSEMYSSQTCGRCSKLHLRLGSRDVFSCPRCEHVAGRDVNAAFNVLRFVCAGSLSVSAIHH

SEQ ID NO: 4784 - protein, 291 aa, Phytophthora nicotianae
MKSKLALMDNESKAKHETMIRQGKKTKEKKKTQLHQALAANHKQVLLPSFNTSEMARKYEKLVTADGTPPTSSDEVTETAVQPRKGKKREIRSSTARAMLAQLHFKFKMLLKYKMECVGGRMIECEEEYTSKTCSSCGEIKDDLGGSSIYRCLFCHVELDRDVNAAKNIFHKNMPAPLRLQRHGAHNATDFARQIISPCSTVSIADTPTTNSPYSGTYASAPTLLSSSLSIITALSYRIDLDTQEMTRSSPISRHPVFYVVSSHSRTLPVRLQGIYVDWMGMLARRGCHVH

SEQ ID NO: 4785 - protein, 614 aa, Phytophthora nicotianae
MICIAFQIKERSPFYNPHRQSQVKMKRTVTYKDDDFVPDSGGESVPKKRKKKRREKTDLLHPSVWFKQEIARVLWMPRKTDLVSVRKPWRSRKKRRVRLCQRKKRKRTKKHGRRHERRTPAFARDRVPESQQLLEPLLTSWFDVDNLAQATPQSGWRTTSVPVAHRYQEIAEDLQELDIEYEEFFNSVIKIRLFPTKGHKEKPDQMFAAQRVIYNKMVAWSREDRTKRLTSRDKAVKMTMKAFGLKYRPIAKLGTMAEYFRNKRGLGRSMQVQNEVRESAYRDFMKATKSSIASKFAPSNSIEITARTFNVVEQHDQTALRFHPTFLGFNKNDGIAIHEDLPALTTSVRLQRLREREYYLIVPRKKELSRSKTERVCAIDRGYRNFVTVYDPDGPAFSVKDAHNVLKKKFEAVDAMKFMLAVKDNVCKDRHRDKVRTKMKKGRKSEEHRLRYLLRRRMRFTSRKAARCVNDLHQKLSCWLSENYHTVFLPSFQTQEMVLKPLNEVASDATPATGSEEDNATIKKRKMRSPTARALMAQAHFKFKQLLKYKMKRTGGRVVDCEEQYTSKTCSRCGVVKDNLGGDRVFRCTSCHAVLHRDVSAAKNILHKNISLLA

SEQ ID NO: 4786 - protein, 313 aa, Phytophthora nicotianae
MARTFKVVELYDQTALRFHPTFFGFDKNDGIVIHEDLPALTTSVRLQRLREGEYYLIAPRKKASSRSKTERVCAIDPGVRNFVTVYDPDGRTFSVKDVNNVFKRKFEAVDAMKSMLAVKGNVCKDRHRDKFRTQMKKGRKNPKSEEHRLRYHLRRRMRFTSRKATRCVNDLHQKLSCWLSENYHTVLLPSFQIQEMVRKHLNEVASDATPATGSEEDNATIKKRKMRSPTARALMAQAHFKFKQLLKYKMKHTGGRVVDCEEEYTSKTCSSCCVAKYNLGGDRVFRCTSCHAVLDRDVSAAKNILHKNISLLA

SEQ ID NO: 4787 - protein, 892 aa, Ectocarpus sp.
MESEENDSSKKPISGIKRKRAKSGSSDKAPGDDDENSHIHAKKELATWAVARGIKNPQTRVCSVTSSMDACVREDVPGKDVLLRQIDKDAKSLGILRHLVSVCLNVLAEKDPSNTLIVNRTFIQQLFTRISGNTLHKSTRPLHHPDLQSYLDESKLDDETLRQVEKFPLRCRDALCGEMMTSIKTHISGNFESRLVDHLSCRLERRLWECRDDEHFWASIPRAAKNIYEAAGQKTPEQALSIIRKFVDQKRGSEKELLRLEWGEAMEGLLSEFRGLFEPLRVKRPPPKDPPDHPKTEEELTGREDFLYNVKARLNDVLQIEAGCRKVDFHLRKRRGEIWSEVNERQQSIKSSKTKEGFLKQRHLLQEIPVPPWFDEGIEMSKKDASNLVRDVRNTRRDMWKSMKEPGTEHPPKAFSLMPHFSLTRAFVRYDSQSIGTLAKSLDFPGVSENQVTLKTTGVKCAGRAERLWWTGIFDFYSERIVNRRPSTEKNQTQRTRKVLRLNNRYRKGIGVCNKDPWFTDEVLYSAKRDDPSCETPWIVNSISTDGLQVKVCLATLAKTNPLPKGVKELVKKGYASIQDKLRVSKSSKGVFKEAFPLYDTEKSRLSSPDNHIEVVGLDPGQVSVYATVRANITSPETFKASDFKGSQSSISSREYKHQSLTRFSARAEVGRRLDNVEYGQAVQAFDSVSLKQPDSSVAYSSVIYCTLRVRVVELLSEERRLQKFARLRARQRTVDGMARDIAFGNTYRQEVRKEQRSSAEPLSPERRKELLKKIRDKRRVVFFGNGQFGHGARGACPRKALIRALGVLCPVVLVDEFRTSKCCCSCGVPLKQVDGSRVFRCSSQMDEGRSCPVRYIDRDANGSANIGVCGVFQLLGFKRPSFLCRKSSEGK

SEQ ID NO: 4788 - protein, 893 aa, Ectocarpus sp.
MESEENDSSKKPISGIKRKRAKSGSSDKAPGDDDENSPDIHAKKELATWAVARGIKNPQTRVCSVTSSMDACVREDVPGKDVLLRQIDKDAKSLGILRHLVSVCLNVLAEKDPSNTLIVNRTFIQQLFTRISGNPLHKRTRPLHHPDLQSYLDESKLDDETLRQVEKFPLRCRDALCGEMMTSIKTHISGNFESRLMDHLSCRLERRLWECRDDEHFWTNIPRAAKKIYEAAGQKTPERALPIIRKFVDQKRGSEKELLRPEWGEAMEHLLSEYRGLFEPLRVKRPPPKDPPEHPKTEEELTGREDFLYNVKARLNDVLRIEAGCRKVDFHLRKRRGEIWSEINERQQSIKSSKTKEGFLKQRHLLQEIPVPPWFDEGIKMSKKDASNLVRDVRNTRKDMWKSMREPGTEDPPKAFSLMPHFSLTRAFVRYDSQSIGTLAKSLDFPGVSENQVTLKTTGVKCSGKAERLWWTGIFDFHSERIVNRRPSTEKNQTQRTRKVLRLNNRYRKGIGVCNKDPWFTDEVLYSAKRDDPSCETPWIVNSISTDGLQVKVCLATLAKTNPLPKGVKELVKKGYASIQDKLRVSKSSKGVFKEAFPLYGTEKSRLSSPDNHIEVVGLDPGQVSVYATVRANITSPKTFEASEFKGSQSSISSREYKHQSLTRFSAKAEVGRRLDHVEYGQAVQAFDSVSLKQPGSSVAYSSVIYCTLRVRVVELLSEERRLQKFARLRARQRTVDGMARDIAFGNTYKQEVRKEQRSSAEPLSPERRKELLKKIRDKKRVVFFGNGQFGHGARGACPRKALIRALGVLCPVVLVDEFRTSKCCCSCGVPLKQVDGSRVFRCSSQMDEGQSCSVKFIDRDTNGSANIGVCGVFQLLGLKRPSFLCRKSSEGK

SEQ ID NO: 4789 - protein, 425 aa, Drosophila neonasuta
MGYVKRRQTFRVYPTGQQEKDLSRLFGCTRVVRNHFIDLMRDAHDQGTPLGLGVAEKAATTQLKRAEGYEFLNEVSSVALQQAARNTTRSFREFFRSCSGSRSKVGFPRYASKRNRQTASFTKAANFHIRQPQGCRWGFIRLPKITGELKFRACRDLDWATVGTVTITRSPSGVYEVSVTHDVEPVILPETVTACGIDLGLTSLAAVVSSSGDRQLVDNPRFYRRSKRALASAQRKLSRTTKGSSNRRKAAAKVAKIGRKVACQRKDHLDKLSRQLVNDNQVIGIEDLSVAALSRSLRLSTSVYDAGWAMFRDMLTYKAADAGRELVVADRFYPSSQTCSVCGRRDGKKPLNVRSWTCVGCSSPLDRDFNAATNLMLYASEAAGHVDSLNACGGSVRLRLAGAVSREAGTHRSRRETGAVGIPVL

SEQ ID NO: 4790 - protein, 381 aa, Drosophila neonasuta
MQPKVVKRAYKYRFYPTPEQADQLARTFGCVRYVYNRALAERSRAWTQEQRRVTFADTSKMLTAWKRDEETTWLTEPSKGPLQAALRHLQAAYDKFWRKQSGYPKFKKKGKTRDSATYYANCFTFRDGKVKLAKQKEPLDIRWSRPLPEGVVPSQVTVSRDNQGRYHISILVEEVITGLPKNDSAVGIDAGITTLYTLSTGEKIANPRHEKKDREKLSKAQRALSRKQKGSRNRAKARRKVAKIHGRIADRRRDHLHKLSTRLVRENQVIAIEDLSVRNMVKNHSLARAISDASWAQFRTMLEYKADWYGRDVVAIDRFYPSSKTCSACGALQGPMPLNIREWTCPGCGGTHDRDINAAKNILAVGLAVSACGDGVRPSRT

SEQ ID NO: 4791 - protein, 215 aa, Synchytrium endobioticum
MTDIPSACTSQYQDYIHRPRYLVRHLETLVDYHDKAKSSRWDRYKRKQRALHEICMSIRGSGTKDDTVVIWGNGNFTSLGRKQGAPTKALKRHARRYMHIITYDVYMTSQRCSHCARRGVPEAVADDPMLSGYVRAQGKSGHVLMAKRTRANRLASVLEDAGCFGVQNCQPLHVLRYCETCSTVWDRDYNAARNILYCFLYERAFAKRPRLFKRV

SEQ ID NO: 4792 - protein, 321 aa, Synchytrium endobioticum
MSEECLFYLLFDIPSFQKTVREVAGVDAKATRAAFMKNPSKGRLLDEVFLLPPEMLAKSRYVLDDSPRRYVRTSSFKTNGLVLCLLWIDTTSKPSPPDRKVEDAINLPNIFSNKSLQSTHKDAWIIALDPGVSCIVGAVAYDPNHPDQRRNLAVTTKGLAEPERRYRDWLEADKPEAICTAERECTKSDQETWAVFLRRFVTSYDIARAYYSTKKYKRKRWDADKAKRGELDRVLEGIVNMVDESMGRKLSGGKKVIVAIGMGDFSSTKSRHVMFIRGYLEHDERPAYLKPPSKNKNTPMKRKVDEGGTSRGGPSKSRKTR

SEQ ID NO: 4793 - protein, 386 aa, Trebouxia sp.
MGPLPVTEWSLQRRPESYLPWLQLVLKDFEEAQDTPDAPKLFSMLPQSNNNTKFITISSTSLQKLLLATGIANVPSLTAKAGAKEFTQHQESWWNQYTDCISFSKRAQQSRRRFKFQVQTDGISVSVLMFQPFPSTQTDTATAATAAPPPPPGRKRKRQQRSSRAAVGAWVQGLPNRHLVQPARIVGLDPGRKALFTAVVHSQQAADSLQGERPAQHRYNSLSWSCSRWQEAAGIKYRLHKTELWISRKPELHAALLATPTAKVASSAQFLHHIRHRMQHTAAAQIHFGDRRHRQLRWRSFIKRQQAYSAICKEISGGRKDTVVAYGDAKFSSSCCKGNPSTPTVSLRRKVGHCCQRGVAKIADPTATVCDCVSTQHVLVYCGTGT

SEQ ID NO: 4794 - protein, 381 aa, Gigaspora margarita
MRYAYNIVVRWNKNRRFCNSSKNFEWIKPHTLNEKLKLYIDVKEGKDLNEKDKKLQRSCVWGERKFLRTVAWLELRLKGLHDKVPANIIDESIDDALTARKNIIQKNLKETKKSSLSFKSKKDLRQTMTICMQNFSKKDWNHFYVTQLHSSLTLLSKRCKPNKLESGKRDLRPFHFEKKRKHNKWPLQKIDCDCKLTYLRKTNEWIFHWVYEAQKQIRETQADVHVIAIDPGVRTPFTWYSSTKGVGKIGEYDIGRIFRLCKHMDNLISKKDRLTSSISKRKKKKALRVDKAIFRIKRKIKRLRDEVHRKTIKFLTDEFDMIIIPPFKVSGMTCSWCGNIQNIGGSEMYNCKNCGIKIDRDVNGARGIFLRTLLDGAMILS

SEQ ID NO: 4795 - protein, 368 aa, Androctonus mauritanicus
MKTLKLRIKDKHANQLNKLAGSVNYAWNYVNDLSYKHLKRTGKFFSAYDLNEYTKGSGELLGLHSQTLQAINETHAKSRKQFKKAKLNWRTNRPDAKRKSLGWIPFKKSAIKHLHTRQTGKKALKSTIQLSLSKGQKLIIDVFDSYNLSLYQINTLEIVQDSRNRWYACITVKDFPKQISGKGSVGIDLGLKESATTSNGDKLTTKQTQKWAERLAIAQRAKNKQRVKAIHAKIKNSRLDAIHKFTTKLVKDNALIVVGDVKSRSFTNKRTKLAKSTYDAGWFELKRQLEYKCKYAGCQLEIVNESYTTQTCSHCLKISDSSPKGRAGLGIRGWRCAECGTWHDRDINAAKNILAVGLDRLAEGIPSL

SEQ ID NO: 4796 - protein, 245 aa, Androctonus mauritanicus
MRVINGYGYIDIDEIIDKVPHLKREDIRKINISNSTLYGYKRNPNKLFNAKFNHIIAIAQYIQQNTIYIGMDIGGKNYIGTSKTDRSKTYIDKSKEIEYILKKYDNRINHKKYDDIVAYSKLKTSLTNHISKNIKDIVKRNQAKTVYVLGEVPNYRNSIISLIFDLTYNVLQRKIKQEDEIILINERHTSILCPECGYKDKKNRTKSNGFQCKNCEFQHDNNDIVAASNIANRAYKKGCFKYGEI

SEQ ID NO: 4797 - protein, 200 aa, Phytophthora chlamydospora
MPSFKTAVYNTYLERLQYFWRNAAFLLQFSVDRPFLKYKFFRKRMARVAVDTIARRIVPDVSARTLVAYGDWSRRRGIKGHAPSPVKGLKEALRKRATVVSMDEFRTSKLCSQCHHALSPVRYVVDIMLQKRRKRKGFVVARNRAEIQLENKKCHGVLRCDHASCTARYWDRDVNAAINMLELLKSEVLGRGRMEQFRRS

SEQ ID NO: 4798 - protein, 484 aa, Phytophthora syringae
MYACYNVEETDCAEALQIRDLLTPENEEWSEKWIPWSNNIKDNGMAFYVRLIWVFQSVVEARMEAVPNENGVKAFSLFPVSTSFVTGHVVINGTTLHGFLARIRQRTGDNLFAEWNLPGVTLSVASFQQNRWSIMRRAFNIGRLETRKEDCPFDKPAFLQLSLDQKYEHASHLFANEIKTDGYSASVLYYRPKDVEPEQGEDDPLVPAGYSPNVVIGLDPGMRSVCTAARQYFRSKAPCKRNRRKIHRPRRSERKKVRFKKRKRNFPKWIRRFKGLRRRQQRPGREIVGVTSREYRHLAGFNRFRAWNESQKRKFPEYKSVIDEMPSFKTASYEQYFKRLEYFWQHAAFLLQFSAERPYVKWRFFQKRMARVAVDTLARRIVPTVSHAPSPVKGLKEALRKRAMVVSMDEFRTSKLCSQCHQSLSSVQYPTPVFPEKSRSPRERRSRAKFCLAIGPRLRSSRATATSCFSVRTRPVRLDTGTET

SEQ ID NO: 4799 - protein, 406 aa, Hydra viridissima
MQRIQAYKYELQPNGEQQRRMRRFAGSCRFVFNKALALQKERYEQGEQKLGYAGLCKLLTEWRNSAATAWLADAPVHPLQQTLKDLERAYSNFFAKRANFPRFKKKGQSDSFRYPDPKQIKLDQANSRLFLPKLGWLRYRNSRDALGDVKNVTVSPSCGNWYVSIQTEREVEQAMPQGGAVGIDMGVTRFATLSDGTFYAPMGSFKRHEVALRKAQQAMSRKQKFSNNWKKAKARVQRIHCRIGDTRRDYLHKTSTAISQNHAMVCIEDLQVRNMSKSAAGTLEAPGRNVRAKSGLNKSILDQGWFEFRRQLDYKLAWRGGWLVAVAAQNTSRTCPCCGHVSADNRQTQARFECVQCGFEENADVVGAINVLRAGHARFACEVSDAVGSPAAGTHRSESGAVQCRP

SEQ ID NO: 4800 - protein, 423 aa, Cotesia chilonis
MDKSEVHSSTYDAYYNGVCKSNGIGEWFNENRINSKEVSKNFWKFVPLFLQIQHEMYDQGKLSFNVFPIYSHGLKFITYDSRCIHELLRRVDSSNTPSSWPEFSENVTMYWNRHFTLPRNFGYSFSTDGVSVCLSMNRIVQKFNSKKAKKSEDALQNTTVSSVRNYSKVIAVDPGAKTPIVTCTRNGGDFSYKILKKERVVYESKECHRARKRLRFLKDIEDRIKSDRESTEQEIGLELTRKSQNAEPYTRFQLKWFDEKQRIYEQRRVQRLKFDKYINDQKMLHKIVDECFGKEPDTLVVYGAGFGFMNKGTFKSHRKFRHNDVIKIIKQRRNLSVYVINEAYTTKNCSYCHDRDRIQQKLSVSKSPHRYVYCSVCRKGIHRDKNGAKNILLKYENKLPISLSSVGTDMNLVDGRQPRVSTA

SEQ ID NO: 4801 - protein, 318 aa, Carpediemonas membranifera
MADVALSISTDGVSVAVTVWVGREKYRGGRVADRPTYKKGSSNKRARLGQDDAEATPAPDIQALMGFDPGARSLGGYTIRRPDGHSVSGVLAKCGYTATPSFRVNMSAASFKTTSLEALKQSIRFVHENIVQIINEGTRKCFRRATFANHCLRLKHFARAGRQLLDDLGGRPPEPIHLEVAYGAALFGSAGTPSCAPYRHFARALPGIMLRHNVVVSVTMVSEFRTFIVCPYCKAHFRRVVHTHRTMLCQNPACEGAPWRVERLRRHPEQSDILLNLSHRDKSASENILWCTLDATSDQIEQSPFHYDSQRGALPRYH

SEQ ID NO: 4802 - protein, 211 aa, Carpediemonas membranifera
MTPRLLLPRTFKLSWASTLVLGRWAATRSAAQTGRVSGVLAKCGYTATPSFRVNMSVASFKTTSLEALKQSIRFVHENIVQIINEGTRKCFRRATFANHCLRLKHFARAGRQLLDDLGGRPPEPIHLEVAYGAALFGSAGTPSCAPYRHFARALPGIMLRHNVVVSVTMVSEFRTSIVWPYCKAHFRRVVHTHRTMLCQNPACEGAPWRVE

SEQ ID NO: 4803 - protein, 231 aa, Carpediemonas membranifera
MTPASFKSTNLDSLQNSIRFVLLHEQEIFDAGMVKSFRRVRLTNHILRQKHFHRAGEQLARTLGWTPRRLPRSIAPPRAAPTRLVVFYGSARFKTPHRVHPCAPYGRFATLLPHIMRAFNITAEVRMTNEFRTSLVCPFCRARFRRTRYTRRTMRCHNPNCQGAPWYRQQRLNSDPTTSTWLNLSHRDKTAAQNILDCGLMTDAYNKPVLSEIQPVFPTITPIHQLRLTSR

SEQ ID NO: 4804 - protein, 406 aa, Carpediemonas membranifera
MSAAVTKLVTLTRAVNLELSQALPEPKLVPFVPMAPVRPGFMTIEYDYMSLTPAMKRRLRVHVNWSATKNLTDEQVAEYERDHGDITKLRRVLFVKTDGVSAAVTVWVGREKYRGGRVADRPTYKKGSSNKRARLGQDDAEATPAPDIQALMGFDPGARSLGGYTIRGPDGQSLSGVLAKCGYTATPSFRVNMSAASFKTTSLEALKQSIRFVHENIVQIINEGTRKCFRRATFANHCLRLKHFARAGRQLLDDLGGRPQEPIHLKVAYGAALFGSAGTPSCAPYRHFARALPGIMLRHNVVVTVAMVSEFRTSIVCPYCKAHFRRVTCGAHRTMLCQNPACEGAPWRDKRLSRHPEQRDMLLNLSHRDKSASENIHWCTFDATPDQIGLSPFHYGTQRGALPRYH

SEQ ID NO: 4805 - protein, 231 aa, Carpediemonas membranifera
MTAASFKSTRLVSINNSIRFVLDNANDIFEAGKRKSFRRVRFANHILRQKHFARCGQQLAREFGWLRHHPIATPIRLKVFYGSSGFTTPAGMFIPCAPYRKFAREIVSLLKGYNIVVDLNMVNEDRTTVVCPHCHAPYKRVRPRDDQHVHPHRVMLCENPQCRGAQWRATVPDALNVDHRDKSAAENILWRSLATEDELSGSPFSRTLIPRLPTSFQYHQLANRQHSSTDG

SEQ ID NO: 4806 - protein, 210 aa, Carpediemonas membranifera
MGFDPGARSIGGYYIRHPDGTTSSGVLPKCGYTKTPSFGFDMTAASFKSTRLVSINNSIRFVLDNANDIFEAGMRKSFRRVRFANHILRQKHFARCGQQLAREFGRHHPIATPIRLKVFYGSSGFTTPAGMFIPCAPYRKFAREIVPLLKGYNNVVDLNMVNEDRTTVVCPHCHAPYKRVRPRDDQHVHPHRVMLCESTVPWCSVARNSS

SEQ ID NO: 4807 - protein, 311 aa, Carpediemonas membranifera
MKRKARERLGVDDADARPAPDPDAHLMGFDPGARALGGFFIRHPDGTTSSGVVPKCGYTKTPSFAFDMTPASFKSTNLDSLQNSVRFVLLHEQEIFDAGMVKSFRRVRLTNHILRQKHFHRAGEQLARTLGWTPRRLPRSIAPPRAAPTRLVVFYGSARFKAPRRVHPCAPYGRFAILLPHIRRAFNITAEVRMTNEFRTTSLVCPFCRARFRRTRYTRRTMRCHNPNCQGAPWYRQQRLNSDPTTTTWLNLSHRDKTAAQNILDCGLMTDAQYQASAFRNPRPPARLPNYNPNTPITANQPLIFASGQAN

SEQ ID NO: 4808 - protein, 338 aa, Carpediemonas membranifera
MGRLLSLSTDGVCVAVTIKRGFGRYRPQHDASMPVRKRAKGREKERPRLGTNNAEAPPAPDPDAHLMGFDPGARSIGGYYIRHPDGTTSSGVLPKCGYTKTPSFGFDMTAASFKSTRLVSINNSIRFVLDNANDIFEAGMRKSFRRVRFANHILRQKHFARCGQQLAREFGWLRHHPIATPIRLKVFYGSSGFTTPAGMFIPCAPYRKFAREIVSLLKGYNIVVDLNMVNEDRTTVVCPHCHAPYKRVRPRDDQHVHPHRVMLCENPQCRGAQWRATVPDALNVDHRDKSAAENILWRSLATEDELSGSPFSRTLIPRLPTSFQYHQLANRQHSSTDG

SEQ ID NO: 4809 - protein, 338 aa, Carpediemonas membranifera
MGRLLSLSTDGVCVAVTIKRGFGRYRPQHDASMPVRKRARGREKERPRLGTNNAEAPPAPDPDAHLMGFDPGARSIGGYYIRHPDGTTSSGVLPKCGYTKTPSFGFDMTAASFKSTRLVSINNSIRFVLDNANDIFEAGMRKSFRRVRFANHILRQKHFARCGQQLAREFGWLRHHPIATPIRLKVFYGSSGFTTPAGMFIPCAPYRKFAREIVPLLKGYNIVVDLNMVNEDRTTVVCPHCHAPYKRVRPRDDQHVHPHRVMLCENRQCRGAQWRATVPDALNVDHRDKSAAENILWRSLATEDELSGSPFSCTSIPRLPTSFQYHQLANRQHSSTDG

SEQ ID NO: 4810 - protein, 304 aa, Carpediemonas membranifera
MPVRKRARGWEKERPRLGTNNAEAPPAPDPDAHLMGFDPGARSIGGYYIRHPDGTTSSGVLPKCGYTKTPSFGFDMTAASFKSTRLVSINNSIRFVLDNANDIFEAGMRKSFRRVRFANHILRQKHFARCGQQLAREFGRHHPIATPIRLKVFYGSSGFTTPAGMFIPCAPYRKFAREIVPLLKGYNIVVDLNMVNEDRTTVVCPHCHAPYKRVRPRDDQHVHPHRVMLCENPQCRGAQWRATVPDALNVDHRDKSAAENILWRSLATEDELSGSPFSRTLIPRLPTSFQYHQLANRQHSSTDG

SEQ ID NO: 4811 - protein, 275 aa, Carpediemonas membranifera
MTRMLAPRQTPMPTSWVRPGCSGSGWILHPPPRWHHLRCGPEVTNLDSLQNSVRFVLLHEQEIFDAGMVKSFRRVRLTNHILRQKHFHRAGEQLARTLGWTPRRLPRGIAPPRAAPTRLVVFYGSARFKTPRRVHPCAPHGRFATLLAHIMRAFNITAEVRMTNEFRTSLVCPFCRARFRRTRYTRRTMRCHNPNCQGAPWYRQQRLNSDPTTSTWLNLSHRDKTAAQNILDCGLMTDAQYQASAFRNPARLPNYNPNTPITANQPPVFASGQAN

SEQ ID NO: 4812 - protein, 482 aa, Carpediemonas membranifera
MEIYTIKASIKQAFRQNYTEERRVGDYAAAKYLYSCLLARLAVECYAQRRQLPLHDADFHKGLLTHLRGGHPGQAYAAIVQSLDTLPMWRETTTQDLVAQLEGRAESHGVSPSLRKWFIRYANSVKLWLARTVTTYRDRLQGTLARLEEALAGVGSPAFFEQELAGVHAILNMVNPEILACLPSLFWATHMGENDGLPVSQAAPRILSCVWAIADGVETLSGLISHFNGEYSMSLRQPRLVPIVPMAPVRPGFMAYGDTMGLLNDNFCHRVGINHALPHATKPLTEEQKRRYRDNPRSMGRLLSLSTDGLAREFGWRRHHPIATHIRLKVFYGSSGFTTPAGMFIPCAPYRKFAREIVPLLKRYNIVVDLNMVNEDRTTVVCPHCHAPYKRVRPRDDQHVHPHRVMLCENPQCRGAQWRATVPDALNVDHRDKSAAENILWRSLASEDELSGSPFSRTSIPRLQTSFQYHQLANRQHSSTDG

SEQ ID NO: 4813 - protein, 349 aa, Carpediemonas membranifera
MSAAVTKLVTLTRAVNLELSQALPEPKLIPFVPMAPVRPGFMTIERGVTALTPAMKRRLRVHVNWSATKNLTDEQVAEYERDHGDITKLRRVLSVKTDGVSAAVKVWVGREKYRGGRVADRPTYKKGSSNKRARLGQDDAEATPAPDIQALMGFDPGARSLGGYTIRRPDGQSVSGVLAKCGYTATPSFRVNMSAESFKTTSLEALKQSIRFVHENIVQIINEGTRKCFRRATFANHCLRLKHFARAGRQLLDDLGGRPPEPIHLEVANGAALFGSAGTPSCAPYRHFARALPGIMLRHNVVVSVTMVSEFRTSIVCPYCKAHFRRVVHTHRTMRCQNPACEGAPWRVE

SEQ ID NO: 4814 - protein, 552 aa, Carpediemonas membranifera
MRRSSRRSSALPREKSKAKAADRCRWIGDLAMWRDPDITPLVQDFVTAYSYLGLCKPFDTWLGEYSTATRVWLSRASPGYLTRLRAGLERVRPLLHDRPGVRQDFLDTLGELDTEVAAIAADHDRYHPQMHALPEGQRVGRTGTVAEALVGVLSCVTRMSAAVTKLVTLPRAVNLELSQALPELKLIPFVPMAPVRPGFMTIERGVTALTPAMKRRLRTTEQVDRYERDHGDITKLRRVLSVKTDGVSVAVTVWVGREKYRGGRVADRPTYKKGNNNKRARLGQDDAEALLPRTFKLSWASTLVLGRWAATRSAAQTGRVYLAYSLSVATLPPPSFRVNMSAASFKTTSLEALKQSIRFVHENIVQIINEGMRKCFRRASFANHCLRLKHFARAGRQLLDDLGGRPPEPIHLEVAYGAALFGSAGTPSCAPYRHFARALPGIMLRHNVVVTVTMVSEFRTSIVCPYCKTHFRRVVHTHRTMLCQNPACEGAPWRVERLRRHPEQRDILLNLSHRDKSASENILWCTYDATSDQIEQSPFHYDSQRGALPRYH

SEQ ID NO: 4815 - protein, 385 aa, Carpediemonas membranifera
MAPVRPGFMHVPCSLNVLNPAWLAQLGVDPEHHATERMTRELLEALPPNIRRVLSVKTDGVAVDLTVQVGALSYVSRRASGNPTMKRKDRERLGVDDADARPAPDPDAHLMGFDPGARALGGFFIRHPDGTTSSGVVPKCGYTKTPSFAFDMTPASFKSTNLDSLQNSIRFVLLHEQEIFDAGMVKSFRRMRLMNHILRQKHFHRAGEQLARTLGWTPRRLPRGIAPPRAAPTRLVVFYGSARFKTPRRVHPCAPYGRFATLLPHIMRAFNITAEVRMTNEFRTSLVCTFCRARFRRTRYTRRTMRCHNPNCQGAPWYRQQRLNSDPTTTTWLNLSHRDKTAAQNIVDCGLMTDAQYQAVLSEIQDLQPVFPTITPIHQLRLTSR

SEQ ID NO: 4816 - protein, 639 aa, Pythium oligandrum
MESWHLVNLHTLRCLEEGIQLPSYDATFFDLCCAGVSSTTHSHTIEGKNPALWKTIQIYRAGRSTTSLKEIEHQTGLPRMKQELRQQMVVNAEVMLREHFRRRLRAYVKVNYPKANANDVVRGCYHTEPTQLAEVREMRALLTPDGVSWCEEWIPWPDRITDKTKIEFYIRLLWKFQRVADDHIDTNPGKSIKGVRAFSLFPVATSYTASHIKINSATLAGLCSRVKKKDPETGDDCSITKWWGVDHIKIDPNAFGQEKWTVMRKAFDIDEFETLRPDTNVTKEAFRRMPVEEKYAHASHLFANQVTTDGYGASVLLFRPKNELDEAEKQLGRLVPEEYRPDVVIGLDPGMRSVCTAVREDLTQHKRVRRRSVRKKQQRKKSWIRRYGGPRHKNGRDIIEVHAKEYRHLAGFRKRRAWEEGLRKSNPEYEKVIIAMPSFKTSRYKVYLERLQYFWSHADFLLDFCWEKPFLKWKFFNKRHARIAVDALAARIVPDPSRQTCIAYGNWSRRDGIKGHASSPVKGLKQALAKRAKVVILDEFKTSKLCSTCHCELSPVSYLVEPDLDKRRKRRGRVISRSHSSERKETKCHAVLQCEEKKCESSYWNRDVNAAINIVNLLKYEIRHSTRIPAFARAQDRSS

SEQ ID NO: 4817 - protein, 481 aa, Dreissena polymorpha
MKRKREHFTLWDAANVHKHKSMWYWWAYIRRKDMVNHEKTDCDVIQLLQSASVKKQKTHSDDFLTSFSVGIRPTKHQKQVLNEMLRVSNYTYNWCLWLVNEKGLKPHLFELQKVVCKTNASDVDPYYRMENDNWFFNNKMSTIKLTSCKNFCTSYKSAKSLKSKLKRPMSVSNIIQGSFCVQKLFIRRLSDKDVSIDNTQMQNRYICMMPDNFEKRSNPKERFLKLAKPITKIPPIDHDVKIVKRADGMFIMNIPCDPKYTRRNASNDTIEKRVCGIDPGGRTFATVYDPIDCCVFQVGIKEDKQYVISKLHNKIDHAHMHLTKAQNKKQQQAARERIVSLKKTHLKLKTFVDDIHLKLSSHLVKEYQYVALGKINVAQLVKTDRPKPLSPRAKRDLLYWQHYRFRQRLTHRTTNTECILDVQNEAYTSKTCGVCGTINKNLEKSETFYCDNCKYNTHRDVNGARNILLKSLRMFPFVNSQ

SEQ ID NO: 4818 - protein, 283 aa, Sitodiplosis mosellana
MLDNPDFRPIIRNLVVVPMCSFRRTHFRIDCTSMNQVLSPQKLLPKVETENKNGETSIKIIGQQDFNHSRDYWWNHYFYMRKIRRFVRGKNQFDFSINTDGIAVSLQAKKKTDNKEIDQKSHIIQKIKDGTIKNYSGVDSGVRSWNTTTTHDIETGKEIKLVYSTKQFHWQTGQKVRNAKEKRWTKKFVEMERADRENRELYPVMPSPKGSHWLNYIKHRVKMMKHGICAYSTAKYTRLALDKHIKSSSVVDKWVNKVTDKQPTVFLFGADGEIPPESSISSR

SEQ ID NO: 4819 - protein, 368 aa, Begonia darthvaderiana
MKTLKLRIRDKHINQLNRLSGSVNFVWNYVNALSYEHLKRTGKFFSAYDLNDYTKGSGELLGLHSQTIQAINETHAKARKQFKKAKLSWRTNNPTSKRKSLGWLPFKQSAIKHIATHQTGKKGLKSTLQLSLAKGQKLVIDLWDSYNLSLYQINTLEIVQDSRNRWYACITVKDYPKTQCGTGSVGIDLGLKDSATTSNGNKLQIKQTLNYAKDLAIAQRAKNKQRVKAIHAKIKHTRQDLIHKFTTQLVKDNALIVVGDIQSNQFNSKKGKLAKSVYDAGWFELKRQLTYKCKHAGCRFEIVNERYTTQRCSCCGEITANSPKGRKSLGIREWICASCGTWHDRDINASKNILAVGLDRLVEGIPLL

SEQ ID NO: 4820 - protein, 368 aa, Begonia darthvaderiana
MKTLKLRIRDKHTAKLNRLSGLVNFVWNYVNALSYEHLKRTGKFFSAYDLNEYTKGSGELVGLHSQTIQAINETHAKARKQFKKAKLSWRTNNPNSKRKSLGWLPFKQSAIKHIATHQTGKKGLKSTLQLSLAKGQKLVIDLWDSYNLSLYQINTCELVQDARSHWYACITVKDYPKTQCGTGSVGIDLGLKDSATASNGNKLQIKQTLKYAKALATAQRAKNKQRVKAIHAKIKNTRQDLIHKFTTQLVKDNALIVVGDVRTTQFNSKKGKLAKSVYDAGWFELKRQLTYKCENAGCRFEIVNEKYTTQRCSCCGDITDNSPKGRKSLGIREWICASCGTWHDRDINASKNILAVGLDRLVEGIPLL

SEQ ID NO: 4821 - protein, 372 aa, Begonia darthvaderiana
MKHCAYKFRFYPTDEQTKLLAQTFGCVRFVYNTILRWRTDEYYQSKAKIGYIQANAKLTELKKQPEFSFLNDVSSVALQQGIRHQQTAFKNFFEGRTKYPTFKKKTHKQSAEFTKSAFKFTDGKIYIAKSKEPLNVRWSRQLPSEPSTITISKDCAGRYFVSCLCEFENQILPKSDSNIGIDVGIKHLFVTDSGIKIDNPRLTAKYATKLAKAQRALSRKKLGSANRAKAKLKVARIHAKISDCRLDNLHKLSRKLINENQVICVESLRVKNMIKNPKLAKHIADASWGNFVNQLEYKADWAGRTISKIDQFFPSSKRCSNCGYILNFLTLDTRYWDCPECKTTHDRDVNAAKNILTAGLAGLAFGENVSLV

SEQ ID NO: 4822 - protein, 368 aa, Begonia darthvaderiana
MKTLKLRIRDKHTAKLNRLSGSVNFVWNYVNDLSYKHLQKTGKFFSAYDLNEYTKGSGELLGLHSQTIQAINETHAKARKQFKKAKLSWRTNNPNSKRKSLGWLPFKQSAIKHIATHQTGKKGLKSTLQLSLAKGQKLVIDLWDSYNLSLYQINTCELVQDSRNRWYACITVKDYPKTQCGTGSVGIDLGLKDSATASNGNKLQIKQTLKYAKALAIAQRAKNKQRIKAIHAKIKNTRQDLIHKFTTQLVKDNALIVVGDVKTTQFNSKKSKLAKSVYDAGWFELKRQLTYKCENAGCRFEIVNERYTTQRCSCCGEITANSPKGRKSLGIREWICASCGTWHDRDINASKNILAVGLDRLVEGIPLL

SEQ ID NO: 4823 - protein, 383 aa, Begonia darthvaderiana
MKTLKLRIRDKHTDKLNRLSGSVNFVWNYVNALSYEHLKRTGKFFSAYDLNEYTKGSGELLGLHSQTIQAINETHAKARKQFKKAKLSWRTNNPNSKRKSLGWLPFKQSAIKHIATHQTGKKGLKSTLQLSLAKGQKLVIDLWDSYNLSLYQINTLEIVQDSRNRWYACITVKDYPKQSCGTGSVGIDLGLKDSATASNGDKLTIKQTLKYAKQLAIAQRSNNKKRIKAIHAKIKNTRQDLIHKFTTQLVKDNALIVVGDIQSNQFNSKKGKLAKSVYDAGWFELKRQLTYKCENAGCRFEIVNERYTTQRCSCCGEITANSPKGRKSLGIREWICASCGTWHDRDINASRNILAVGLDRLTLLVRSVESLHTRKNRDLPVKA

SEQ ID NO: 4824 - protein, 384 aa, Begonia darthvaderiana
MIKGHTIELTPNNKQATYFAKACGVARLAYNWALAEWQNQYQADKVYRDNCQKNGIAIDRTKLNNPSQFKLRKQLNFIKKTKFPFMFDVTKCSPQEAIIQLGKAFDNFFKGRAKYPQFRKKGINDKFSLTNDQFKIIGKNIKIPNLGWVKLTENLRFNGKIMNATIFKKGMKWFVSIGVEINETPKPLPRTDKAIGIDLGITDLAVLSNGTKVQAPKPLKSKLKQLRRLSKQLSRKQKGSKNREKAKTKLSRLHYKISCIRKDFIHKLTTKLVKMYDVICIENLNVKGMVKNRKLSRAISDLSFYEFKRQLIYKANQSRKTIKEVDRFYPSSKTCSHCGFVMAKIDLTLAIRNWQCPSCDTQHDRDINASLNILNQADRVLTLS

SEQ ID NO: 4825 - protein, 352 aa, Clogmia albipunctata
MKTLKLRIKDKHCKALDQLATEVNFVWNFVNDLCFKHLQRTQQFFSAYDIAKYTKGTSKECNLHSQTIQAITEELITRRKQFKKAKLKWRVSHKKSARRSLGWIPFKKVAIKYADGYVQYGKHQFRLWDSYELSKYNVKTGSFVEDARGRWYVCLVVEAIPTIKSEAKTSIGIDLGLKDLATCSDGIKLKAPKIYREYEQKLGIAQRAKNNKRVKAIHAKIKNIRQNMLHQFSRKLVNEHAAIFVGNVNAKALAQTKLAKSVLDASWTTLRTMLKYKCENAGVWFEEVNEAYTTQTCSCCSSRLSSPKGRMGLGIREWQCMECGTLHDRDINSAMNILALGHERLAGGITLF

SEQ ID NO: 4826 - protein, 397 aa, Papaver nudicaule
MQRFQAFKFELMPTGEQQRSMRCFAGACRFVFNKALALQKQHYEQGEKKLGYAGLCKALTVWRNGVETPWLADAPVHPLQQSLKDLERAYASFFAKRTDFPRFKRKGRSDSFRYPDPKQIKLDPSNSRICLPKLGWLRYRNSRKVLGEVKQVTVSASGGKWFVSIQTEREVEQVVPQGGAVGIDMGIARFATLSDGTFYAPLNSFKRHEDALRKAQQAMVRKTKFSTNWKKAKARVQRIHFRIGNARRDFLHKATTAISQNHAMVCIEDLRVRTMTKSAAGTTRHVRAKSVLNKSILDQGWFEFRRQLGYKLAWGGGCLIAVPAQNTSRTCPCCGYVSSDNRKTQARFACVVCGFEENADRVGAINVLRAGHARCACEVSDGVGRQQQEPTEATCSG

SEQ ID NO: 4827 - protein, 415 aa, Odontarrhena argentea
MNDTQLLAYRKKLKKEKLKPKEEQKEITCNLFSEPNFEKPYVDYNFLDALFKAMIQNDYRALPTQCSQSIMKGLFQNWKSFFASLKDYKKNPNKYAGTPRIPKYIRSSEKEILYTNQDCIIKNGRFLKFPKTKLQLNIGKLGFTEGKLKQVRVIPKYNEYVVELVIDVPSEQQMIEENARYMSIDLGIDNLATIVTNTGMKPVLVKGKHVKSINQYYNKMKSHFTSILRNGKQTNEGPFTSKRIEKLHQKRYLKIKDVFHKVSHHIVKLAQEEEVCKIVIGQNKSWKQETNMGKRNNQSFCHIPHNLLIQMITYKANAVGIQVVVTEESYTSKASFLDNDFIPTYGENDQNTTFSGKRIERGIYRSANKTLINADVNAAANILRKVIPNAWTNGIEGLGVKQLANVLTPLTLIVR

SEQ ID NO: 4828 - protein, 368 aa, Raparia bulbosa
MEVNQIMMNKAYKFRIYPNQAQAILINKTIGCSRFVFNHFLSLWNHAYKETGKGLTYGICSAKLPAMKKELVWLKEVDSIAIQSSVRNLADAYTRFKSKKNNVQSYTTKQTNENIAVVGNKIKLPKLGLVRFAKSHEVEGRIVNATVRQNPSGRYFVSLLVETEVQKLPKTHSYIGIDVGLKDFAILSDGTHYENPKFFRSLEDKLAKAQRVLSRRMKGSSRWNKQRVKVARIHEYISNTRKDYLDKISTEIIKNHDVIGIEDLQVSNMLKNYKLAKAISEVSWLQFRSMLEYKAKWYGKQVIVVSKTFASSQLCSCCGYQNKDVKNLNLREWDCPSCRTHHDRDINASINLKNEAIRLLTARTAGLA

SEQ ID NO: 4829 - protein, 422 aa, Tilletia controversa
MADPPPAPWIGSVAPESVLWPGVEGTQQAAEWHNAPSNTWFLPKYAHLPHPVVPDEDIGGMLTELSATLRQRLDAVPPPPPPRRARPGERQDNSRLKTYRTRLRPNTQQKEALRKTAGIFRWTYNRAVAYLKAHPNASLNDVREHSVTEDGLPLMNLSWVTPVPYSIREQACLEAHTALRNGLADVRDGKIPHFELKFRKKRALFSSFRIRTRDWVGGCLKISNFGLGPGQHQTKIQTGIDVPSLEHDGACIKQENGSWFLLWQKDKGEEKMRVPAARGPEMCAIDPGVRTFATIYDPLRGMAAKFGDGDHKRLFRLGTHLDQLISRSTQASAKKRYRMRRAANRLRARIRHLVDELHWKLRGYLKQNFDTVLLPTFNAHQMSRRAQRRIGRKTVRAMMSLCEACSYASHRSGRRQNTEGRL

SEQ ID NO: 4830 - protein, 415 aa, Tilletia controversa
MADAPPAPWIGSVAPESVLWPGVEGTQQAAEWHNAPINTWFLPRYAFLPRPVVPDEDIGGMLTELSATLRQRLDAVPPPPPPRRTRPGERQNNSRLKTYRTRLRPNTQQKEALRKTAGIFRWTYNRAVAYLKAHPNASLKDVREHSVTEDGLPLMNLSWVTPVPYSIREQACLEAHTALRNGLADVRDGKIPHFELKFRKKRALFSSFRIRKRDWVGGCLKIPNFGLGPGQHQTKIQTGIDVPSLEHDGACIKQENGSWVLLWQKDMGEEKMRVPAARGPEMCAIDPGVRTFATIYDPSRGMAAKFGDGDHKRLFRLGTHLDQLISRSTQASAKKRYRMRRAANRLRARIRHLVDELHWKLRGYLKQNFDTVLLPTFNAHQMSRRGQRRIGRKTVRAMMSCEATSCACHGNWVRR

SEQ ID NO: 4831 - protein, 421 aa, Tilletia controversa
MADPPPAPWIGSVAPESVLWPGVEGTQQAAEWHNAPINTWFLPKYAFLPHPVVPDEDIGGMLTQLSATLRQRLDAVPPPPPSRRTRPGERQNNSRLKTYRTRLRPNTQQKEALRKTAGIFRWTYNRAVAYLKAHPNASLNDVREHSVTEDGLPLMNLSWVTPVPYSIREQACLEARTALQNGLADVRDGKIPNFELKFRKKRALFSSFRIRTRDWVGGCLKIPNFGLGPGQHQTRIQTGIEVPSLEHDGACIKQENGSWFLLWQKDMGEAKMRVPAARGPEMCAIDPGVRTFATIYDPLRGMAAKFGDGDHKRLFRLGTHLDQLISRSTQASAKKRYRMRRAANRLRARIRHLVDELHWKLRGYLKQNFDTVLLPTFNAHQMSRRGQRRIGSKTVRAMMTPSGVLQSAFPLRLCRQPKACA

SEQ ID NO: 4832 - protein, 398 aa, Craniophora ligustri
MDKSEVHSSTYEAYYNGMCKSNRIGEWFTENKINSKELKKDFWKFIPLFLRIQHELYENNKPSFNVFPIYSHGLKFITYDSRCIHELLKRVDPNNTPSNWSVFSENTTIYWNRHFTLPRKFGYSFATDGVSVCLSMNRIIKKGQKFKSKKVKRSEESIENTAVGNKRNYSKVIAVDPGAKTPIVTCTRNGDEFSYKVLKKERVVYESKECHIVRKRLRFIKDIEKRIRVDRESFEKETGIELTRKSKNVEIYTRFQLKWFDGKQKLYEQRRFQRLKLDKYINDKKMLHKIVDEYFGKEPDTLVVYGAGFDFMNKGTFKGHRKFRHNDILKIIKQRKNVLLYIINEAFTTKNCSKCYEKKIQQKLHVSKSQHRYVYCSVCRKGIHRDKNGAKNILLKFE

SEQ ID NO: 4833 - protein, 557 aa, Autographa pulchrina
MSISCKTCGGLDHTRKSSKKCKEYLPPIRKRTFDPGVELEVYTIKRGLSSIICPLLEQEKRLKLLSEIRRDVRDLSRVYIELGVWINYYLKTSPVLPSKPDVLNFLYAMKGKGPYSESYRTMFGDRKYNDKLRSFVVQEMAKQYETTIHTNIKTHAYARLARYFNVKRNNPELFNAFFKKILPENHEEMTRICSLINVDTLKSKWWATIPEWLRIQEQLQDFRLFPQPSHGLKHITYTSRGWHELLRRVDPSSITSIWARIENHMQELWSLWLEVDTKRFGCCLQTDGVSVSLSMNRLINKNKTCLSLEKRKKPSYDRIIAVDPGSRLPVAAVESTRGQFKRITRKYVRSHTLEWKRERIRTKLCSTSERAEQRAREQFNFPVSSKYTSHVIEYTVFRLTWFNVRQEPYELHSKLTRLRLDKYIRTAICEERIIKEVFDAGGIEKKKILYGAGSKFMNKATFSGRKFKHDSLIRRLRSKRNIDVEIVDEQYTSQACSACNEKMGAFHKIVMNHRLRWGVCPNCRNEFDRDANAARNILINYTRSTICRPGCSTNGAS

SEQ ID NO: 4834 - protein, 309 aa, Griposia aprilina
MCKSNRIGEWFTENKINSKELKKNFWKFIPLLLRIQYEFNEMKKTSFNIFPIYSHGLKFITYYSRCIHELLRRVDQKNTPSVWSVFSENTTMYWNRHFTLPRKFGYSFSTDGVSVCLSMNRIVQKDQKFKSKKVKKCEESLENTAVGSKRNYSKVIAVDPGAKTPIVTCTRNGDDLTYKVLKKERVMYESKECHRVRKRLRFIKDIEDRIRVDRESVEQETGVELTRKSKNAEIYTKFQLKWFEEKQKIYEQRRLQRLKFDKFMNDQKMLNKLVDEYFGNEPDTLVVYGAGFDFMNKGTFKRHRKFRHN

SEQ ID NO: 4835 - protein, 305 aa, Chlamydomonas reinhardtii
MARLLGLPSPHCSDGGSGGGDGNSGDGSGSSGGSSDSSDGVGGGRNGGGGARGAGGGRARGRRLWQQARLEEQPALKRCQAGIPSARVASAAEHELRIRHLYSGGGVDAAAAAGSAPAPVQQYGLWHLLRFYRQWGQRRWRLTVHVRTQKVLEHTAQQLAGGRPKEEVIVGWGNANTGYGGCISRLGRRGPNRALLRLLVDKYAHLVVYVDEFYTSQGRDVNSATSIQHALVEMLLGHKRPASLQTGGGGSGSGSGSGGGGGGGGGGGGSSSGGACAHLGSGGDGKGHMEEESAAPPKKRRKRAG

SEQ ID NO: 4836 - protein, 234 aa, Chlamydomonas reinhardtii
MAAAAAAAAATAATASAGAETEVAAQGGREVEGQETGRRLWLQARLKEQPALKRCQAGIPSARVASAADHERRIRYLYSGGGVDAAAAAGSAPAPVQQYGLWHLLRFYRQWSQRRWRLTVHVRTQKVLEHTAQQLAGGRPKEEVIVGWGNANTGYGGCISRLGRGPNRALLRLLVDKYAHLVVYVDEFYTSQVCAKCGRRLLGNGQRCLQAVVPWGGLRAHQVQVCNHCGTVWV

SEQ ID NO: 4837 - protein, 369 aa, Chlamydomonas reinhardtii
MAAAAAAAAATAATASAGAETERRGWRGTRQHTHQRAATERRRQQRACFTRLSGAGYRHCTGQTGRRLWLQARLKEQPALKRCQAGIPSARVASAADHERRIRYLYSGGGVDAAAAAGSAPAPVQQYGLWHLLRFYRQWSQRRWRLTVHVRTQKVLEHTAQQLAGGRPKEEVIVGWGNANTGYGGCISRLGRGPNRALLRLLVDKYAHLVVYVDEFYTSQVCAKCGRRLLGNGQRCLQAVVPWGGLRAHQVQVCNHCGTVWGRDVNSATNIRHALVEMLLGHKRPASLQTGGGGGGGGGGGGGGSGGGGGSGGGNSGGGGSGGGGSGSGGGACAHLGSGGAGKATWRRRAQRSRRSGASAQAEEPAGGV

SEQ ID NO: 4838 - protein, 225 aa, Chlamydomonas reinhardtii
MPTKRSKGGGEAPQEHPWQAAGQEAGQAAGQEAGQAAGQAEAAGPAEAGSRGAVHVLWHYHFSAFRRKRWAAFIQRDRALHRVAKQLTGGRPKEEVVVGWGSWAFQGGKGGSPISVRGGRAPTGRLIKLLRERYAKHVFIIDEYKTSKTCYNCGCQEMAIKRLGGLKEGQRPWSVKVCNDCLTTWNRDVSAANVIRVLLLLKLMGFERPTKLQRPPWPPPAAGPG

SEQ ID NO: 4839 - protein, 222 aa, Chlamydomonas reinhardtii
MNAKTSCCQPWWPAPCSTEPCGPWTSWSGRGPNRALLRLLVDKYAHLVVYVDEYYTSQVCAKCGRRLLGNGQRCLEVVIPFGGSRARDVQVCQHCGTVWGRDANSATNMRHALMEMLLGKPRPAALRPAGGGGGAGPGGGGGGGGGGGGGAGPGDGGGGGGGTAPTGGNSSGHGVGPGGGGGTGGPGPSGSGGAHVRSRGGGQGHVEEDSAAPPSKRRRRAG

SEQ ID NO: 4840 - protein, 202 aa, Cyanidioschyzon merolae
MSEVTSRGAGFQAFLKFMKVRVAHWEALWEEYTKPRWARLRMNLYCGKQRAFANFFNQLSALKVDVSQRLVVAYGAGRWKTQKGCTPAPTTRAHKECARRFVTIPVDEFRTSYTHHELDCTLQRVEMEKCQRSPEDIIKYGPLTEEQMERRAKVRRLLALVSTTNHGKKRMEFVNRDFDAAINIRKCAVLETRAPEWTRENF

SEQ ID NO: 4841 - protein, 203 aa, Cyanidioschyzon merolae
MSEVTSRGAGFQAFLKFMKVRVAHWEALWEEYTKPRWARLRMNLYCGKQRAFANFFNQLNALKEDESQRLVVAYGAGRWKTQKGCTPAPTTRAHKECARRFVTIPVDEFRTSYTHHELGCTLQRVEMEKCQRSPEDIIKYGPLTEEQMERRAKVRGLLALVSTPSDGKKRMEFVNRDFDAAINIRRCAVLETRPPEWTRENFV

SEQ ID NO: 4842 - protein, 400 aa, Spizellomyces punctatus
MSFFPAYCKLSGLYERHGFRRFSAIPLRRSLIQSHVRIDTVILYTHILCIFRREAEAVEKDDLWLRVCNLRTKAFRSRRGGGMQFEGSITTDGTSVSVYLKHPDADKYGKRGGKKKSAKTLAAEVKAVYVEKNLPACRAAENVVVIDPNKRDVLYCQDNKGTIFRYTANQRCKETGSRRQQKERQWMKKEAGMDLIESRIPSHKTMNLMDFLRYLLVRRVDWNRRKDFYSHPAHTRWKWHSFINRQKSESDLISNMRNKYGENLTVVMGDWSDAGRTARFQTSSKTKGWRTLFKRNRIDCFLLDEYKTSSVCPRCSSSEFVEKKFKERPHSRPYRRREGKIEKVHGLLGCTNPNCLQQAWTMRYWNRDTLSTCNMLTIVQSMLDGHGRPEVFSRGVPAVA

SEQ ID NO: 4843 - protein, 568 aa, Spizellomyces punctatus
MVAAFSPLTHPDMGCPTCNGTDHHRASSKLCSFYKPRKKNEVRTTLKRKRDTDLPNDEIFILSTVVKSGQRSPLQVVIAHAARTLTCIAAEATRLFNMFVLDLLERKQQIPECSYNKFLHQPFQIIALAKASSPQLQTIHRTLYRQTSRYDVTYLSQLISNMAKDYETNCMNHVSTNIRKWAFKWYRMKMQKTYPDLKRDKIRILFNKEDDLNEHSLYLKACLMTYDVDITKEVSFDHWWTYFPLMWKFQRYFAKHGERNFSMVPITTYGIRHIRLDTNALYKLCLRVDLFTRKDVPAAEFRTNALVYWKTLFPDIAETSNKSFAYGVSTDGVACSYYYQKRYVRRRQSHNYYGFDDDGKYGAMNLEDGVSIVGVDPGRIDIFTAVDGNENVVRMSRKEFYSLTGMVASQKTRNRWLKNNPAVQSIVTQCPTPRTPDIENFRQHCQYVQQHLLTLVDFYGARRFTRQKLHTYIGKQKVWATIVRRITKNDRRTVVALGDAKFRHNSKGGPSTPLARMAKELKRRHRVRMIDEFRTSITCSHCDGELPKSTRHWQVKVRWAVMNSVSQK

SEQ ID NO: 4844 - protein, 232 aa, Phytophthora parasitica
MCCGILIPVDVICLWRRTNSVKRSSIKTLTTRRATRKRMSGKRIVPTFLEAVRNMPTKKTASLEQLEAYVKFMTPRMDLLLEFPMHEPFCKLRFRRYILAKKKLRQLCQRLIAQAGRRKIVGFGDWSNTDVSGLIKECPAGPVNPFQRELKKHCRVESIDEFRTSKLHSVCHCEMKNRYSKRLCKKDGVERTLKVHSVLHCTNNGCHGMTVNRDENTLKNMLMLLIECKLRR

SEQ ID NO: 4845 - protein, 343 aa, Phytophthora parasitica
MYPEGMEPPPQWAFETPKNFRFNALRKFESGVMSAFSNLENGNISKFKIQFKSRKKDGRYFTFCEDAGNAKITYMDGAPRAMLSISKLKDIPIRCDRSIEIANEIQIMNTNGFWYAIIPQYVRPGDYVNRGRTIALDPGMKAFMTGVDLEGNALHIGRGNKEHLDKYRARIQNAQQEMSTIKNFQGHRSGRQWRAFARAKRAFHCATAKLNNCVKEMHYQTSAYLTKHYDTIILPVFNSKDMVKKSSARNHTFNRLLLGLKHFQFRKLLQAKCELMGKSLVVCSEMYSSQTCGRCSKLHLRLGSRDVFSCPRCEHVAGRDVNAAFNVLRFVCAGSLSVSAIHH

SEQ ID NO: 4846 - protein, 472 aa, Phytophthora parasitica
MGERPEWWRASVGHRAGEVWLPSAQDNRARVLTKGIKQKSWFQLNNVVEKESRPSFQPSSEASTPSETPNSVIKIRLYPTKSQKTLLNKMFGTHRANYNKLVETSREDCYKLKLSELSQKYRPISQKHSLANYLPEYHLEVPEEVMDSTYRDFTKALKSSRALFKALKKKDKKTSFPELRFKSKKDNSSSIEFRNRGIKSANGLVQFKPRYFGFSKNEGFLIKEKMPDLQFSVRLLRTRDEKFYLCIPRVKVFKQTTSTRTCAIDPGVRSFITMYDQDGLTLGVDDANEYIFRRCLTIDRLISRRTRETNKRKRYRMGKRLTKMFNRVKAMIADMHHKVSSWLSKNYKQVLLPSFQTSDMTSRQKRISSKTSRAILTWSHYKFKMMLAYKMERSGGRMIECEEHYTTKTCSCCGRINYGITSQKVFDCNHCNLVIDRDVNAARNIFLKNEELLTWVPAQVPGDAYSEVVRCA

SEQ ID NO: 4847 - protein, 370 aa, Phytophthora parasitica
MSAKDKLMIRRIRKYRLFPTAEQRKKLHQFMGTCRWTYNKGVAHFRKTNVSSAQTLRDLYVTEKSKKQRVYPEDMEPPPQWAYETPKTFRFNALRKFESGVKSAFSNKINGNISKFKIQFKSRKKDGRYFTFCEDAGRANIMYKTGESRAMLSISKLKNIPIKCDPGIEITNEIQITNTNGFWYAVIPQYVRPGEFDNRGKTIALDPGMKAFMTGVDLDGNALHIGRGNKEHLDKYRARIRNAQQEMASIKNFKGHRSGRQWRALARAKRAFHCATAKLSNCVKEMHYQTSTYLTKHYDTIILPVFNSSVMVKKSNARNHTFNRLLSGLKHFQFRKLLQAKCELMGKSLVVCSEMYSSQTCGRCARLHLX

SEQ ID NO: 4848 - protein, 208 aa, Phytophthora parasitica
MIRWFAFGRPTSIEQTNTLNTPTKKTSSVETFCNSIEFWFQHGHELLSFFMDPFFRKLKFRRCTLRTAQLDRACFALAGARRTKAVVGFRDCGMAGEGLIKRSVAGPVKACTCKLARYCEVVVVDEFRTSKKHFDCQTTDDLTNQRVMRKCRDGVVRKVPVHKVLHCLRKHGGCGKSVDRDVNAAKNILSILQNQLAGISEQPLRLRR

SEQ ID NO: 4849 - protein, 250 aa, Phytophthora parasitica
MINKMATTMAVNSANMLALHFRRRLHQYVRFRYAKEGKIQLSYNKTKKLVDSCYRVHEVQAFDTNGNPTATTTMWGAWDKWRTLEQRELREWLAEYYHLAKLNKKRVWDLNLRKTEPAYALILKEMPSFKTSQLTTFMDRLQYFVEHVGFLVSFSAKTSFRKWRFLTTSSKMQALTAIARRLVPIRSAQVCIAFGDWSCQDGLRGNPRAPVQALKKELERRATVLPVDKFRTSKLCSGCHKRLLSARLLX

SEQ ID NO: 4850 - protein, 512 aa, Rhizopus microsporus
MSDNNSSNCCKELPVASRKALAYFIYKQKQGPEPSWPSPVPCSNFYKEITGSIASMWSKYQPDQFFIMENIPSKVTSKAYVYRKLRELPFTGALSKKKFNSLREETLQSINSNKTFVPGKKLAKLTPQQVSVVQHFIDTVKTRIQDSTFTPSKYTDKRGCRFFPLRLYIPKPTDFYYHLFNFTKLGFCTRDSLTSGKKFRNVITTDDHSISFPFTRTVKRSLTTTRSPSDFTNDIQNGCDIWGVDPGVSTTLTAVDTPRRQRTTSLDEYYHLYGYNDANFIRKKHQEQHTAQFLKISNLSSLKTSNITDLYDDITSYYNENAWSSKLKFQCYIRKQKGVHEICKGLMHGSVKYNKKASTGIKTSSAEYKSKYCPPAPLDHPDKPRKTIIAFGDGMFNSSLRGNRGASVRLIKKTLQKYCENQLEICMVDEYLTSQICNRCKNRNMDNVVTEKSKRRVHTILKCKQNTCNIVWNRDIMAAHNILDIFLFALRNNNQRLDVFIRQGTSNGQPSV

SEQ ID NO: 4851 - protein, 366 aa, Rhizopus microsporus
MCEILQGKSLNCFLLKRAFILPYVAIGTLILSTQILKNPITSHLDKEIIWVSVLNVAAKAMKPQNERKTMKLRGMLFTEGVGVSVLKQNDNMKKGGSGTGRRTKAVDEEDFKYVEKLEKEVLLAGIGKCVLTDPGRRDMLYCMHEESTIENRRTYRYTSNQRIIETKTRKFKKLRENLKPDNVRAVEVSLSNCKSSTVNVGKFAKYLQKRATVTPVLSKYYANEDIPAVDANLLPFRKMKPPSFINGQQADKRLTRNLITKLGDDATLIIGNWSTGNVKFHEPIRGTGMRRMLAKQGFKICLLDECKISSLFPSCLSGKLEKFKKVQNSRPFQREKQPTVTCHGTLRCKNQQCLEDTTGTISRRHI

SEQ ID NO: 4852 - protein, 528 aa, Rhizopus microsporus
MFLNGICKKKEESNCLRKKMTEERYADYIIQETIKRTLILPCMKVKLAVAKKQIPNDEILNADAKDQIKEFFSMYSTEYNFQKASIYYDVKANLGKHFKAFHKLLNYAKQIKLKTINAILYEALNYYILKYKNKKERKLTIWSKVINLEKKGMKNQGIGKTLQFEGTIETDEICASIIKQNFDTSRKRPGTDNSRSQKPKKTTIGDNNNVKHIKILTRTEPLSTNGRCVLIDPNHRDLLYCMKETSSAENKQILRFTSICRSKHSRRFRILRKKAKPEEVRLAEEMLSKTRSSAMNANIFLEHSKASSAFEDVLSNYDSHETKGPKGIYYPDLRNDFEFKKCNLYWGNLFGARFPAIFSKSIAIQDNNTKLQTYAINIQIISLLQTLQLLPFRKMRFSSKLLLQQNNDKLIKSLKKKFGHDAVLGLIQMLKKSGFYLYLINEYKISSLCPDCKGKLEKIKIIDNPRPYGRKDMSKVKCNGLLRKILMSFRETREHPSCFRQIQPLPKPSYKRRQGEGPSSNKRTKLSA

SEQ ID NO: 4853 - protein, 470 aa, Rhizopus microsporus
MNFEGTLDTDGVGVSLLKQNFSPDRRGTLNVEGKPLKADNDEFRYLESLSKKELDNTLKKCVLIDPGRHDLLFCMHEDSSIEEKKLFRFTRNQKLVETKARRFNKLRKFMKPAYIQELEASLSKIPAATVDLVKYTKYIKRRSKVSQPLKRYYSSEGEFLDRNIGYVYEDSDEDDPAIGIDDTAAATDNICPKPAFECKKSKNKLGTYLSNLRYIHQENNTQIQLAEDDITQLNTVIQQTDEILQKPETTEEGFESQISIVKNLLEETKAKLPTLKFRKMKLQSTINRQQSEKRLVNALKAKFGEDAVLVLGNWSASHVKFHEPTKGKGMRKMLRNEGFEVLLIDEFNTSSICPECNSDLKKFKTIENPRPYRRSKMLEVICHGLLKCVNKDCLKIEGKDRVWNRDLAAVLNFRKILFSLRETGDRPEAFNKSRKDGNRKRKPPTKENKRTKRTKHNSASVIDEASTVQG

SEQ ID NO: 4854 - protein, 394 aa, Naegleria lovaniensis
MLEQNKGKTLLTTTEDDYFKILKNPQTNLRFKQTRWLWDQELKHCPADIKLNAVKDFVKAEKITRYKNKQAAEKESKEAARKAKSKFLKDVQKGKKEMITDEELNERFNPKHFTRQPREFEMKGRSNQHPYQSFKVTNISLSQEGVLLKPTFFKGNESACPSKKSTDHLLKFYYPARARKWLKEEIDNKKFSHETTFVRERGRYFVCLPVRYHKALTRQEFQRFDKSFYESNSNSGTEYDTKFLKDCPQPSQDELRKEYIALDPGVRCFMYGYDSNGDALEFAAQGENTILFSLSLKQDQLRSEIAKNKFLKYNSRQERKFYKGLRKALKKKIRRLESKIRNKVNDMHNKIIDYLTFHYSEIIIPEFNVKAMIARKQKQRKRQGKEDTTCQVIY

SEQ ID NO: 4855 - protein, 644 aa, Contarinia nasturtii
MGNAFNHLITQYITNVKNNIKVWAFSRIKKFFTPKRYELNLNRQGNLITELDVKRATKIVMFQSRVERNTNIDLLLNEAAGIGLPINVHFQNLIRDRWFQTIPIFINIQRQIFDFHAKYEMLKQRWFQYRRDPNNNVMPTTPLPPKIKNFLVVPIHDFDMKHIRIDIHLFYLIARKFGALKLAKGKRGQPINIEKTEYDSNPAFYWNLIFDMPKISKLGNGKEFDFAVATDSVAVSLCFVKPERNTPELDNNTIKEKYNNFEFDYVLGIDPGVRTWNATVRKHVRSGNEENITIDGPKYHFKAKYGKRKRKSDQWTELLQKQRDLDYKRYAFFPSPKGRSHWMCYIAYYVKMMKPAMAVYTTRKFIRLRLDKYIEENRASDKIAASLTKKKSALVFIGAAQIAPNSPIGIKKRLRCPGLRRLLNSFKKLGNCIVRLVDEYNTSQTCAKCFRPFDRRTKSDRYKVCQNCIPSEDESSQWNLPNVIITMKSNRVYQQLRKYAVDFVNRLNAANPDHIPMDSDGLVSKLQVCFKNWQLNTGIWKDNRAPFQLKTVWHRDIVAAKNIMYKGEKISLKLKMFKNVLANNLLFTILFLGLCTVLGLDIHPQLLRPQNQNAAVQNQAADDEDSSDDEDYVYVLDVSDDDQF

SEQ ID NO: 4856 - protein, 741 aa, Contarinia nasturtii
MSGRKRNHESAFKPRKKIKIKEHQTIKKSARKGLKVNLPINTGKFAQLIDVYVLEMTRCYILGALNLHYFTSDHFKRSTDEQIEAFYTQFVDKNFFRDWFYGVQFIEHAFNDARESGYRLCYGIWYYCQKYGVRAPVIGGFGNVVEYAVQMFYTNYKNNICMHAHSRIRKFFTHQNASKAQIDDTMDFLFKRNSNCVPDLNLMWELENTLKPIRFDDGKGYFFAMESNWFKYIPIFLNLQQYIRNHERERKAALKRGERTELREYRNFTVVPTSSFERHYIRIDRRVFYRMLRQIECPHRLFRNKNGGPKQKEEIKNKEWDVLWRLYFDIDSIEREPRNKNDGHATIKFDNSIQTDGVGMSFLMERTKFIIEKDDEERMKETQDMLLKSQQVYGLDPGLRLVIGGVRINNFNDRNNRTETIIRLTSGQYQDMINSSRRNKWRKKLTTEIDEKMRLHRESFDEQPGPRAEDHKSYADHILRHFEEKFTAYTQYEYALQAFLQYIDTNRALDAYATKLIDGKQTFIFVGDRFIAADSPARGYIRSKVRDLFEKLKRRRKCTVVEVDEFRTTKLCSLCFRELEKPTKRGKVKEKYRYLTCHGCEPLCGENVLGKAQGPIESRKSNRKLTQQRKHRPRTDGPRMASKFRKYEEKTQIGRTITWNRDANAGRNILYKGWCAVMNIELHPAFQRHVEEEEENAGGGDPPPAPPARARQSRRAASNQNQQTTQRTLRSHLDQARSSRP

SEQ ID NO: 4857 - protein, 648 aa, Contarinia nasturtii
MVERNSEEQFRWPDDEKLGNGLRYFYKQYITNIQTNTNTWCEKRLENFFRMRCWYRNRFHNGSRFDNIDIRNAKEFSYRFKNLTNGNNVDPQRVEKFNILMRDLTEIGWSGTVSMKFFAKYRWFESLWLFGQMQRQIEVYHSHAEQWNTIHEMFRNNPNFQEPTINRPPKISSFALIPLCDYHLKNVRLDIKDLYYKIVNELDLVPSFLNTQTNRMNKRNLKYYTQTDRSGLWNMLFDVGKINKLGKSKPFHHQILTDSVSISIMYKKPQRQQRPQRQQRPQQTTQANRGPEKLIGKKYIIGIDPNEKSWLTVVRRNIQKTPDEPAVEENIIIPNQRFHWETQQKKRDKEAKKLAGWFDIEEKEHLKTYPYRPPSPRNSTWKSYIEYRIKMLRKGMAAYATREYARLDLDHHIRSTRVNDQIAVRVTNNKPSLVQFGAWAMKPDRPFGIKKRKRCPGSRKFRVSIKKLGHSEVEMQDEWGTSQTCANCQERFPRHTKDDRFKVCYDCRAKKIDGLPDSVAGLPDIIVSTVNRRVLRRKRAIIKRQIIDGNREAVNEKLRTGRLMSKVKVTYKNWPLNVDDDDVVPQTVTWHRDIVAAKCIMLKGMNQLETEYSLFNVFALNYIGLCRIFDVPLPVSLLRPPDQNNNVN

SEQ ID NO: 4858 - protein, 451 aa, Contarinia nasturtii
MLRQIECPHRLFRNKNGGPKQEEDIKNKEWDVLWRLYFDIDSIKREPRNKNDGHATIKFDNSIQTDGVGMSFLMERTKFIIEKKDEERMKETQEMLLKSQQVYGLDPGLRLVIGGVRINNFNDRNNRTETIIRLTSGQYQDMINSSRRNKWRKKLTTEIDEKMRLHRESFDEQPGPRAEDHKSYADHILRHFEEKFTAYTQYEYALQAFLQYIDTNRALDAYATKLIDGKQTFIFVGDRFIAADSPARGYIRSKVRDLFEKLKRRRKCTVVEVDEFRTTKLCSLCFRELEKPTKRGKVKEKYRYLTCHGCEPLCGENVLGKAQCPIESRKSNRKLTQQRKHRPRTDGPRMASKFRKYEEKTRIGRTITWNRDANAGRNILYKGWCAVMNIELHPAFQRHVEEEEENAGGGDPPPAPPARARQSRRAASNQNQQTTQRTLRSHLNQARSSRP

SEQ ID NO: 4859 - protein, 354 aa, Contarinia nasturtii
MSFWMERTKFVVVKDENEIMRETQEKLLKAQQVYGLDPGLRLVIGGVCVTNYNDPNKENRREKLVRLTSGQYNHMIGYRKRNKWRKKLTFNIDEKMRIHRESFDEQPGPHSDNIDRYVDHILRHFNEKFEAYTQYEYALQDFLQYIDTNKTLDKLADWLIDGKETFVFVGENFIAADSEAKGYIRSKVRDLFEKMKRRRNCTVVKVDEFRTTKVCSLCFKDLEFPKKGDRVKMKYRYFTCRGCEPLPEGNKPHGPIDSRKSNHLLTKQRKHRPRPGPRMASKFRRYEEKRTIGRTITWNRDTNAGRNILYKGRCAVMNEELHPVFQRPTAPIQNQQPIQGTSRSIQDQARNSRP

SEQ ID NO: 4860 - protein, 251 aa, Contarinia nasturtii
MKHIRIDIHLFYLIASKFGALKLAKGKRGQPINIEKTEYDSNPAIYWDLIFELPKISKLGNGKEFDFAVATDSVAVSLCFVKPERNTPELDNNTIKEKYNNFEFDYVLGIDPGVRTWNATVRKHVRSGNEDQGYLSFENITIDGPKYHFKAKYGKRKRKSDQWTELLQKQRELDYKRYAFFPSPKGRSHWMCYIAYYVKMMKPAMAVYITRKFIRLRLDKYIEENRASDKIAASLTKKKSALVFIGAAQIX

SEQ ID NO: 4861 - protein, 201 aa, Contarinia nasturtii
MKSNQVNDNIAVTVTNNEPSIIIFGASEMPPKRPFGLKRRKRCPGSRKFLVSVKKLCHSVVKMEDEWGSSQTCANCQERFPANTKPHRFKVCYGCKAKPIAGLPDSVASLPDIIVAKVSKRALQKGRKETKRRIRNGNYQDVEEILRNGRLMSKVKVTYKNWPLNVQGDVAAAKCIMLKGLCRMFGVLVPYSLRRPPNNVT

SEQ ID NO: 4862 - protein, 297 aa, Contarinia nasturtii
MLRQIECPHRLFRNKNGGPKQEEDIKNKEWDVLWRLYFDIDSIEREPRNKNDGHATIKFDNSIQTDGVGMSFLMERTKFIIEKDDEERMKETQEMLLKSQQVYGLDPGLRLVIGGVRINNFNDRNNRTETINRLTSGQYQDMINSSRRNKWRKKLTTEIDEKMRLHRESFDEQPGPRAEDHKSYADHILRHFEEKFTAYTQYEYALQAFLQYIDTNRALDAYATKLIDGKQTFIFVGDRFIAIDSPARGYIRSKVRDLFEKLKRRRKCTVVEVDEFRTTKLCSLCFRELETRQKLAK

SEQ ID NO: 4863 - protein, 637 aa, Contarinia nasturtii
MTRCYILGALNLHYFTSDHFKRSTDEQIEAFYTQFVDKNFFRDWFYGVQFIEHAFNDARESGYRLCYGIWYYCQKYGVRAPVIGGFGNVVEYAVQMFYTNYKNNICMHAHSRIRKFFTHQNASKAQIDDTMDFLFKQNSNCVPDLDLMWELENTLKPIRFDDGKGYFFAMESNWFKYIPIFLNLQQYIRNHERERKAALKRGERTELREYRNFTVVPTSSFERHYIRIDRRVFYRMLRQIECPHRLFRNKNGGPKQEEDIKNKEWDVLWRLYFDIDSIEREPRNKNDGHATIKFDNSIQTDGVGMSFLMERTKFIIEKDDEERMKETQEMLLKSQQVYGLDPGLRLVIGGVRINNFNDRNNRTETIIRLTSGQYQDMINSSRRNKWRKKLTTEIDEKMRLHRESFDEQPGPRAEDHKSYADHILRHFEEKFTAYTQYEYALQAFLQYIDTNRALDAYATKLIDGKQTFIFVGDRFIAADSPARGYIRSKVRDLFEKLKRRRKCTVVEVDEFRTTKLCSLCFRELEKPTKRGKVKEKYRYLTCHGCEPLCGENVLGKAQGPIESRKSNRKLTQQRKHRPRTDGPRMASKFRKYEEKTRIGRTITWNRDANAGRNILYKGWCAVMNIELHPAFQRHVHI

SEQ ID NO: 4864 - protein, 766 aa, Contarinia nasturtii
MDDDELDDNQPEESKYVVIKCGLQTILRQQHERIERVGEVVTKMLFERSVQMTEVAALASLSILFILNEALDNDDRAFFLKPHPSLFIADCFRAVLNQHVNNINSQYRILPEFRFMVERNSEEQFRWPDDEKLGNGLRYFYKQYITNIQTNTNTWCEKRLENFFRMRCWYRNRFHNGSRFDNIDIRNAKEFSYRFKNLTNGNNGNNVDPQRVEKFNILMRDLTEIGWSGTVSMKFFAKYRWFESLWLFGQMQRQIEVYHSHAEQWNTIHEMFRNNPNFQEPTINRPPKISSFALIPLCDYHLKNVRLDIKDLYYKIVNELDLVPSFLNTQTNRMNKRNLKYYTQTDRSGLWNMLFDVGKINKLGKSKPFHHQILTDSVSISIMYKKPQQQQRPQRQQRPQQTTQANRGPEKLIGKKYIIGIDPNEKSWLTVVRRNIQKTPDEPAVEENIIIPNQRFHWETQQKKRDKEAKKLAGWFDIEEKEHLKTYPYRSPSPRNSTWKSYIEYRIKMLRKGMAAYATREYARLDLDHHIRSTRVNDQIAVRVTNNKPSLVQFGAWAMKPDRPFGIKKRKRCPGSRKFRVSIKKLGHSEVEMQDEWGTSQTCANCQERFPRHTKDDRFKVCYDCRAKKIDGLPDSVAGLPDIIVSTVNRRVLRRKRAIIKRQIIDGNREAVNEKIRTGRLMSKVKVTYKNWPLNVDDDDVVPQTVTWHRDIVAAKCIMLKGMNQLETEYSLFNVFALNYIGLCRIFDVPLPVSLLRPPDYNNNVN

SEQ ID NO: 4865 - protein, 427 aa, Contarinia nasturtii
MNKRNLKYYTQTDRSGLWNMLFDVGKINKLGKSKPFHHQILTDSVSISIMYKKPQRQQRPQQTTQANRGPEKLIGKKYIIGIDPNEKSWLTVVRRNIQKTPDEPAVEENIIIPNQRFHWETQQKKRDKEAKKLAGWFDIEEKEHLKTYPYRPPSPRNSTWKSYIEYRIKMLRKGMAAYATREYARLDLDHHIRSTGVNDQIAVRVTNNKPSLIQFGAWAMKPDRPFGIKKRKRCPGSRKFRVSIKKLGHSEVEMQDEWGTSQTCANCQERFPRHTKDDRFKVCYDCRAKKIDGLPDSVAGLPDIIVSTVNRRVLRRKRAIIKRQIIDGNREAVNEKIRTGRLMSKVKVTYKNWPLNVDDDDVVPQTVTWHRDIVAAKCIMLKGMNQLETEYSLFNVFALNYIGLCRIFDVPLPVSLLRPPDQNNNGN

SEQ ID NO: 4866 - protein, 545 aa, Acanthamoeba polyphaga
MAKTTNGKFWNDECEKISDLLWKPNLIVNHKPQERINFKCDNKYITFNYYSNNVPINDQLKFIDIPQSNNTDKKNKLMDRLLKIEDTRYKKDIESNKTRKIKLTKEQLTAKHNTQLLKIQNKISQLDGFIRSRRIQLLPNYFQKHILDIWFNETTIIYNQLLTEFTQYYIKFKEIASDNKELVNLLKTNTEFPLSLQKLRNLKIHDIINIYLEDQLIHKLETPFCVIANTIKEFVANVKGNLTKLAENKINEFTFKHKNFNRKIRTISVDSKYASENSFYPDKLGKLMQTYEDLKGFSWQNVKHDFKIVYDKYDDKYYAHIPKYVYRNLNILNKKPIAVMDPGERTFQTLYGLNHVISIGDNLRETISKRLLRIDNLKSKLDTPGSKKHNLKLNRKTRVRKCRYKKAIDRHHKKIEHLQRELHYKTAIYLCENYQRIMVTDFSSKKVSSKDGDLDAMSKRILGKISHYRFRQRLQQKCEEFNCQYLEVNEAWTSKTCCNCGYIHAKLGTSKIYDCPKCKQKRDRDVNGAINILLKNRKLVLMEDQ

SEQ ID NO: 4867 - protein, 520 aa, Acanthamoeba polyphaga
MKEAVKTVKPKVPAKKRIVTGSKTKKKVFVKKKPPDKKPLKKPVKKTVKTYKLKSIYVSNKDLKMSKWIPTPKKEFTEIETNSWYEHRKFENPNGSPIQSYNKIVPVVPPESIKQQNLANKRRKTNKPIVFISSEKIRIYPTKDQQKILQTWFRLFAYMYNSSIDYINNKKVVLESGKINITATRKICNKISVRKALKTTRDNLIQSTNPSIMTHIMDEAIGLACSNYKTCLTNYIEGHIKKFDIKPWSISKRRKIIVIEPGYFKGNSFCPTVFPKIKSSKPLTMIDKTVTLQYDSDTRKYILFVPRVTPKYSVNKEKNSCGIDPGLRDFLTVYSENETQSICPIEIVVNTTKNEYKKIDKINEIIKTKPNLNSKRKKKLNRGLRKYHRRVTNKMKDMHYKVSHELVNTFDKICIGKLNVKSILSKANTVLKSALKRKLATLSFYRFTQRLTHMGYKYGTEVVNVNEYLTTKTCSNCGKIKDLGASKIYECESCGMYADRDENAAKNILKVGLKPWYKQK

SEQ ID NO: 4868 - protein, 482 aa, Acanthamoeba polyphaga
MVHNQDLSISNKTCGISDWLPSVRNKKTSDIKSNSWFDIRRCLNPNIKTKFVPVNNKQIVLKEPNCIYLKYDLITLNPSSDHIRILREWFSLYAKIYNYAINLIRKMFYVNNKLIKSRLQCEIYDEIIIRKLSNDKTKLIESLKLSDRPPEFLLDYAISHACTYCNSQVKKYLKDSKNPYNKKTLRFRLWSLHKSRRVMHILPPKLCDKNVCNGLFLKLNPSKNIHDIYMFCVMSWDRLTGKFFVYKPVLKRLINIPKKQFTRCGIDPGVRTFLTLYSSERTYDVCDSTFYNNKIKRMWRKIDRINFLLHNRKKRKKRKNDRRLRKSLAKYYRKIRQRIKDLHTKTAKYLVSRYKEIYIGIYDTSKNLSDPRISFYEKRRIATLNHELFLTKLQQVADRFGSSVFAINEHMTTKTCSKCGRINEIGSSKVHKCACGMYAGRDENAAKNILKKGIKEHYLSAQSDKNVTEYNNKKSNNTNKET

SEQ ID NO: 4869 - protein, 817 aa, Ectocarpus siliculosus virus 1
RRKCRLVGCTADHQMRNTTPMMPSDVKCGGIQNAKVYSKVWNFNLAPVTQFIIISIILFIMVRPSSDGNSHKKKKHKKIPPRAPPKNIPGFLQTVASLYPNQYLTASGNLPKSCKGTYCCQLFSRVRFGKEVSQQLRTRTVSVGFRAATTDEKRDTFQSKVNDAVDHLSRERVLASLFANFVFMERLQNGSALPEPDRAFFKSCLSSCILSRGGGSLNADFDRFSEITGLTRLVPPKSMNLDQQREHEAQRMATATSTRATHHAEKRRISITRWFLRGRISRGDLDCKKYATKLYNLAEKIITNFDGTPEDTQKLRTMSRAIDPGTDTNIIIDFAWQEKEFSDRDRGDGKSAETIKHLNWMFNTYVAESRRMYEEAVSRSHLFAPGKDKACRKKRDEFMKHELGEEFTYAPPKDTAVLPICSTGAVFIYIDMKTLGSWGLLHSNDAWWYKDVLRPFSKEANVKCLVNKENARYASSEHGYLSSLLESGPDKCPWMIGESFLTDGVQIKLLLKTLEHGRKAFSGSSELNEKGYNKLPRADVQLESLLGEGRGVYNISSLLKSTSIREDVVVMSADPGQAKVINVSSATARTWAKQDPGVILKTSTCVFGDDYRRDTLASRSDEYETFRRKGQPYGVAIDRLGNEKKRTSCLATFIQYCRRWCVNGPVLFRETLQTGRKFMRFDRFRATQKTLALIADKYMGHVEDTCRVMLFGKASFRAQKGRASAPRKALIREMASRGVVLMVNEYNTSKMCPGCGEDTVEDKERRIRSCKNFKIGSPEESCRLHRLTPEFEMDRDDVGSTNIGMRGFGKLLGQVWF

SEQ ID NO: 4870 - protein, 817 aa, Ectocarpus siliculosus virus 1
RRKCRLVGCTADHQMRNTTPMMPSDVKCGGIQNAKVYSKVWNFNLAPVTQFIIISIILFIMVRPSSDGNSHKKKKHKKIPPRAPPKNIPGFLQTVASLYPNQYLTASGNLPKSCKGTYCCQLFSRVRFGKEVSQQLRTRTVSVGFRAATTDEKRDTFQSKVNDAVDHLSRERVLASLFANFVFMERLQNGSALPEPDRAFFKSCLSSCILSRGGGSLNADFDRFSEITGLTRLVPPKSMNLDQQREHEAQRMATATSTRATHHAEKRRISITRWFLRGRISRGDLDCKKYATKLYKLAEKIITNFDGTPEDTQKLRIMSRAIDPGTDTNIIIDFAWQEKEFSDRDRGDGKSAETIKHLNWMFNTYVAESRRMYEEAVSRSHLFAPGKDKACRKKRDEFVKHELGEEFTYAPPKDTAVLPICSTGAVFIYIDMKTLGSWGLLHSNDAWWYKDVLRPFSKEANVKCLVNKENARYASSEHGYLSSLLESGPDKCPWMIGESFLTDGVQIKLLLKTLEHGRKAFSGSSELNEEGYNKLPRADVQLESLLGEGRGVYNISSLLKSTSIREDVVVMSADPGQAKVINVSSATARTWAKQDPGVILKTSTCVFGDDYRRDTLASRSDEYETFRRKGQPYGVAIDRLGNEKKRTSCLATFIQYCRRWCVNGPVLFRETLQTGRKFMRFDRFRATQKTLALIADKYMGHVEDTCRVMLFGKASFRAQKGRASAPRKALIREMASRGVVLMVNEYNTSKMCPGCGEDMVEDKERRIRSCKNFKIGSPEESCRLHRLTPEFEMDRDDVGSTNIGMRGFGKLLGQVWF

SEQ ID NO: 4871 - protein, 693 aa, Ectocarpus siliculosus virus 1
MEVDTESPEPRTKKRCTRKSGVEQSLHAEGDEESSSTRRSCICLDLERTLVKSVIPKYIRDRLERMSRYTGSFRYIVGLFSNYVVIRRLEQGLQPPEVKKVFYDRCWAAINTRISGKNTRNDFSDLLDEFIDQTGFDTSLFPPRVPSRLQETVTREMEVSAKNSIVVHLEAKIKGFLRFRLMNDSQLAFQHLPAKDRSRIIISLSNDCLEREMRGDLDPGYVPHVLQVRDLLAQVYSTEPDVSVLKVLKKKPHLFLELISMISNVAEEASDNNRDLREETKTRSDEEKVRKAFYMSERIKRGLVDRPKMCTVLPVWKLAPCFPYYSSSVVGSTFHKEGHDFSSVSRFISEHFDLGRVNRKGYKPSGFRSDGYQVQVTFMTLVSKKPLVPGTKDLAKSGYQIAKKVVSLETQERGLFVLSQARKDSRKIVADRLHAYNLTVVDPGCASVVSVRSCPLEFCRCVGSVREKSTDWEMKGTEYSAKSGRTMLEGREKKRRSNDEYGRCFPRFSAVKKKTARKSSFVAYCRVAAETFKVMFAEKMKRARKRSRFHSSRLVQKTVDKLASSMAACPSDRKNIVLFGNGSFRAKKGHASAPRKKLVRAICSRVNVGMLDEFRTSKMCPGGCGGEMTDVQGGQRVRQCTTVSVGVENPCPLFENAVAFRYDRDASATLNFCLAGYCGLVRKSWPTHLLRGQ

SEQ ID NO: 4872 - protein, 693 aa, Ectocarpus siliculosus virus 1
MEVDTENPDPRAKKRCTRKSGVEQSLHAEGDEESSSTRQSCICLDLERTLVKSVMPKYIRDRLERMSRYTGSFRYIVGLFSNYVVIRRLEQGLQPPEVKKVFYDRCWAAINTRISGKNTRNDFSDLLDEFIDQSGFDTSLFPPRVPCRLQETVTREMEVSAKNSIVVHLEAKIKGFLRFRLMNDSQLAFQHLPAKDRSRIIVSLSNDCLEREMRGDLDPGYVPHVLQVRDLLAQVYSTEPDVSVLKVLKKKPHLFLELISMISHVAEEASDNNRDLREETKTRSDEEKVRKAFYMSERIKRGLVDRPKMCTVLPVWKLAPCFPYYSSSVVGSIFHKEGHDFSSVSRFISEHFDLGRVNRKGYKPSGFRSDGYQVQVTFMALVSKKPHVPGTKDLAKSGYQIPKKVVSLETQERGLFVLSQARKDSRKIVADRLHAYNLTVVDPGCASVVSVRSCPLEFCRCVGSVRERSTAWEMKGTEYSAKCGRTMLEGREKKRRSNDEYGRCFPRFSAVKKKTARKSSFLAYCRVAAETFKVMFAEKMKRARKRSRFHSSRLVQKTVDKLASNIAACPSDRKSIVLFGNGSFRAKKGHASAPRKKLVRAICSRVNVGMLDEFRTSKMCPGGCGGEMTDVQGGQRVRQCTTVSVGVENPCPLFENGVAFRCDRDASATLNFCLAGYCGLVRKSWPTHLLRRQ

SEQ ID NO: 4873 - protein, 468 aa, Megavirus lba
MENESIISTRKIRIFPCKEHIDLFNKCFGATRYIYNKTLDAIKKLYKKNSKALRTKAKKGCVHIAPKKKSGSKTTKHKTQCGNKLHNKYFCLKHKHIKPKFDMPLGFQFWRNKMIKKNTDLPESEKWLSDIPFDTRQLVIKNILANHKSAITNLKNGNIKGFDIKYKSRKNKNQFFFVDYRALKSDGKLWNRTVKTPLNMRKGEKKWFDNYMKEYGLKKFGDEKSDKERKDMVITREYPGMYYLHIPFSKFIEKKPIQKSIVSIDPGIRTFHAFYDPIGKSGKIGDGLINRIIKLYKKMDKIQSKITKTNPKNNDFRYKKNKLHRQNMRKRCAWLRTKVKNIVRDYHWKTASFYCKNYGYVVIPKLDTNSLKKRIKKDYGVSKGSPMIRRMMALSHNEFINKLVYKSREYNTKVLIVNEAYTSVTCGNCGIKHEKLGSNKIYKCIHCKKEIDRDINGARNILIKTLSK

SEQ ID NO: 4874 - protein, 416 aa, Megavirus courdo11
MNKSSWIPEKNINYINLKTNSWFDILKTSRKINKDYNKIVCTPDVLRCEKIRIYPTDKQRDILHKWFNLHRKMYNVTTKFLENKLWKNDVFVKKNISKYVNFRILRTKYLKSDKEKLCKHKVNKHLLDQAISRCVAMYKSAITNYKKKNIKNFRIRPLKKNKRYKNLIIEGCLFSKTKNSFCTSIIGEINSEKPFNNTKKTCILSYDKYKSTYTLNIPRDSGKGTFTTRKLVCGIDPGVRTFLTVYSKKDCYQICNNPNFKKYYKRMDRLNEIFTSEESCQTRKYKKSIGKMFDKINNKVKDMHFKVAKYLCSRFQILKLGNISTNKIVSKETGNIGKSTRRLLYSLSHFRFREILTHQAEKYGCKLKIVSEYLTTKTCSNCGNKKDVGKSKVYECNKCELYVDRDINAAKNIRYV

SEQ ID NO: 4875 - protein, 526 aa, Bandra megavirus
MFWNDQCAKLSKSLWIPSNTINLKSNKKKYFKCDNPNISFNYFTDSIKINKKIKFNDIKITDNRDKKEKLRNKLIKTENTRYNKEQNNQKCKLNKQELNEKHKKFLDKIEIKVNQLDGFIRSRRIQILPNNKQKNIIQKWIYDTTSIYNKLVCSFNQIYDKCQKIVDNMNVENKFYHLGKIIKQNTEFPINFHKLRALKCSDFIQDYDRIPYCVIADIIKEFVSNIKSCITKISKGLITEFKFKPRKYNRICSSIPLESHYTTARGFYPSIFGEIKTNEKIFSWLDIKHDYKLIYDKYSNKYYIHVPKYVYRNDLTIKKPIAIMDPGARTFQTIYGLDHVITIGDDLGSTFKKRLLKIDNLKSKLSKPGKYKHNKKLDRKTKVKKWKYKKAIDRHHKKMDHIQQELHYKTANYLCSHYNRVVVTNFSSKKVGLKKNDLDAMTKRILGKLSHYKFRQRLLTKCEEYGSQYYEVDESFTSKTCCKCGNIHKTLGSSKMYNCTKCKNKLDRDVNASICILIKNKDILLK

SEQ ID NO: 4876 - protein, 667 aa, unidentified
  source 1..667: note = Indivirus ILV1
MTTIKKPPDEIRTLKIPLKKIIKNEKLIPIIFDAVSRTNQIIIHTYMFLRLWILDKYNNKMDIPTITEDIIHMGFKALTLESFGPKPKGQNKIYYEEFLKFYENIYKQLGYTQKLNGKNLSQILNYSATSIKTCIENNIKLHFFDYMRRFVNTSFSKQHSEILESYKGKEKTEMTECLKKELLAVKQDLLDNTKLSDKKYHKWIDIHRPNIFPKDIETVTQSDINGDPCKFIKNMIYMVTQLENNDQKLFQFFPLRTSIIPKYATIDTKTLIELFEKDKQEKLKDIEKYKKEIWKTHFKTDCNIFKMNNYSFNYLISTDCYAVSINFIHDDFLEKKNEKSKLMANGRINQKINTKGLSQKEKDKLKHDKKELQKAKQKAARQKKKEEFSKLTKEEKKQFMENKKKNTYIEFPYIDELSQNTLKDLLNNCIYIDPGKRDLLKIIDDDDNLFTFSNREYINKTKRKEYSNYFQKYKDKTGISKIEAQLSDFNSKSCDIDKFKKYISKKNEINGKLFSAYCHEKFRKYNWYSFINKQKTESNLLNTIENKYGKEGKKLNIVIGDWGKGKQMRGFISTPMIGMKRVLARRFNVYTIDEFRTSKYHYKTETIGKNLYVTDKNNESKKIHSVVTFKMENNCMGCINRDVNAVKNMRKLVKHWIKYNEKPDVKS

SEQ ID NO: 4877 - protein, 814 aa, unidentified
  source 1..814: note = Indivirus ILV1
MKKKKEPDKNKSDKEKEYEEKYRKYITSYKTHKTSLENIIKNTDDLEKINDAVYRINLIICHTYQFLKLYYLYEFHNKGRIIVIDEQLVNTTMKLFCVRDKRGKNPSEKVVSLKQKLQKFYNNHYEKLLPEKLQISFTNLSTILDYEKKNIVTCIKTHISEHFEQCINRYINVLVDKDKNMNYIKYMKHYNPDNNLMHYMDTKTPEELKNRMIINGKNVPNNKKLSEPLKKKLMSVYTKELNVLKRDIMMNEDKCNPKYNEVKEKIRNDILNNLFNDYVKNALNNGLNNIYSIIDNSNQLINGELCTDDSVLPDDLKGYIKEYNKKRADKLITDILSNNITDNNTKLVKKKLIKQYMKTSIYDKINNDPLSLLPSLIKINIALEEKGLKTMSVFPLRRSIIPKYTTIDTTTLVHVLFPESMNKGEYLTKGNLKKYQSKIWETFFNMKNKIFKNKKYQFNYQIDTDGVGCSVLLIRKDLFNPNKRIRVNHIKKPVRFRSERYVDELMEEEKELYIQLKKAVIDPGKCDLIYATDGEVQSYTKKNGKSTYKIKSFRYTQRERNQETKKRKYSKIRENDKVNTVIKCNHIDESFINYLKENGYYEVMGYVKTHKISKTVKELEDILSSANSKSCNYKKTQEYIRIKSAINNVLQEYYQKKLYRKLRWNSYINNQKSEARMINQFKKIFGNPNETIVYFGNYGGSNLKHCEPTKGKGLRKIFRNVGYRLFLVDEYNTTKKNFITGQNNEKFLMRRNPRPFKQGVKLVHGLLRSKTIQSNEPMTTGHILVNRNTNGSMNISKLVDCVLRNTPIPPYLTR

SEQ ID NO: 4878 - protein, 674 aa, unidentified
  source 1..674: note = Indivirus ILV1
MSAIEEKKTKPPDKSTDYFKCVKIPLKHVLKNPDINLSKITDAVIKCNKIVINTLMFMKLYLLDYFEKNNKLPEIDKVFVNSCMKILCNESASGRPPKKEIKELKDKLTAFYKSDYKPLIKDTDLDYTHLNTVLDYLTIGIITMYENNIKLHYVEYIERYVNIVWKKKETILKIKEENKKEDKQKELVNEFCRQLRKIKTDILEISSEYKSDVKYHNWIKDIKKTITPNKDKYQKDNLYYDLQCDPQEYLPCMIRMMKEVEKDKVMIYNVFPMRNDIIMKSIKLDTTTLVHLLFTQKQGNKTDYLLEGNLKKHENKIWEFFFRTERQCFKKPKYTFHHMIETDGVSCSILLLRNDLIGKRIPNIKVGSNTEQYIDELNDYTNIKNKKIVSYDPNLADLIYCVDNDSKEANEFRYTQDSRRKECKIKKYAKIILEFKKEKIEGKTIIEYETELSKLNRKTLTIKDFKEYIKKKSEINNKLYKFYEKYIFRKLKLNGYINIKKHEQKMINNFKKIFGKPEDVIICAGDFEQKQHMKYKEPVKGKGIRRIFRNNGYKLYLVDEFRTSCMCSICKEETGRCEKFITRKNPKPYKSSNILVHGALRCKNCEAVWNRDVNSATNIYRIAKNAINGIERPKYLCRENKVDDKVEKLKKEKVKKVVQKKANKSVKVVALTKS

SEQ ID NO: 4879 - protein, 363 aa, unidentified
  source 1..363: note = Indivirus ILV1
YNKVLASINNGEKINSFELRNKYVTSKTRDGKNNPLIKEWEKKIPKDIRNGAIRDLIKNYKVCFSNKKNKNINFKMKFCSVKDTPSIEIPNTSISIKENKIFIFKKYLKSGIKTGKKQLFNLDIKYFCRLQIVNNEWFLIVPYKKEIPQNTVDLRHDFCALDPGTRTFQTIYSPELCLQIKVNKEKIKSYTNKSDKFDSLRKKKKITRKRHKRRKRKIYSKISNLIDDMHFKTINYLTKTFKHIIIPVFQTKNIAMKSNNKYLNRDLMLMKHYSFRTRLQANGSLNKCHIDVCTEEYTSKTCGACGLLNNVGKSEIYNCFKCKTIIDRDINGARNIAIKRLSEYKSYKKNKVTGKKNINIITL

SEQ ID NO: 4880 - protein, 526 aa, unidentified
  source 1..526: note = Catovirus CTV1
MSSKKILNRRQKKKKKKEEKLKRRNLEINNYKKTIIKHTNNIWIPPHNIKYKNTDTDSWFTIKKYEDKKNNKIDDFKCNIPTNKNKAKKLMPCTKVNFYPTKMQKIILERWFDAFALMYNATLKFIKQKFKENKDNNNNAEATEKKSTSVVKTISKKKIKIVAKKPKKKINPTNFYNNRKMLKNKRCEIETNSTITNKKQLDVINSELKQRKNTKKKSKKIKPVRTSINSHTLDYAIKLACINYKSALTNYRNGNIKFFRIRYWRKNRGNKILVVEKQFIKKNTIFQKLFGDIDLEYNREKYTLKAKSNITIHYNSKEKKYLLLVPEKCEVKEAVKKNKTIVLDPGIRSYMTGISKNEVIKIGNEQDKIKEILMRKDRIMENEKVPYVKKKKIERRLNTRIKNMVNELHWKTINYLVNNYDNILIGDMSVKSIVSKNESTLARITKRIGYSLSLYLFKQRLEYKCKLNKKRYSEVNERYTSRMCSVCGWYNEKLGGDKIFECKECKRTIDRDVNGARGIYLKHLQK

SEQ ID NO: 4881 - protein, 461 aa, unidentified
  source 1..461: note = Catovirus CTV1
MQKDYKKRRKKFIDSFCSFLQKHTNKLPHTLNNKKHITHDSFSWFDINEFTTNKATDKNINFPSKFSNTYTKCKKIKMKLDRKQRIIINKWFDVHTDMYNSALKYIRDTSDLFKNHVIKSKLFNVDNNLINSFKLRDGLIKTRKELILKSQINTIDDDTKIHSHTLDYAVRQLVSNIKSAVTNLKKGNIKRFRLKFWKHSRPSKTMDIEKAYISGNKICHKILGDISYEYNNEEYIPENFTCGVKINYNSMTDEYLLLVPERGPVKETKKTKNIIVLDPGLRTFMTGLSESALYKIGTNITSTVKKSITRLNKIKENVHISKKIKKKNERIINRKITNKIDDMQWKTINFLTQNFKNILLGDMSAKSIVSKNKSVLDNETKVACLRMRFYDFRKRLEYKCNKTKTNYRLINECYTSKICSLCGNYNEKLEGEKIYKCSKCKKEMDRDMNGCRNIMIRSQMR

SEQ ID NO: 4882 - protein, 458 aa, unidentified
  source 1..458: note = Catovirus CTV1
MTKKKKKFKKKKIFYKKYHKFNWLSRLFNDNQFSDLSSYIFFHGDHFWKHKYNLPFKSQLSFSWFDFHKSIQISPANPIMPSDARFVDKTKFNAKKTESFVLHPNPLQKKILLTWIDAFTDMMNETIKFQKNRLFHKKQLILDSRKLRDHNLKTIKNKIIARTGVNSHVMDQAIKLICEMYDSSIANIRNHKRPFRIRYIKKNKNKRILKMEKILISKNGKTFCSSVFGKFLDNRLSNVTSDFTIQYDKLKDRFMLFYTKNANKIKTNKKDQMGLDPGIRTFLTGYSNNHAIKIANNAHDRISDIHKKIDEIRGSNLSKRRKIKALEKRESKIENLVKDLHWKTAKYLTDNYGEIIIGNFSTKKMGEQEGMNKMVKRVGNSLSLYKFKQKLQYKCLLKNVKYKEVDENHTSKLCSNCGVEYKWNLQGKKIYDCNYCGLEMDRDINGAKNIMIKSIIRK

SEQ ID NO: 4883 - protein, 458 aa, unidentified
  source 1..458: note = Catovirus CTV1
MTKKKKKFKKKNIFYKKYHNNNYVSRLLKDNQYSDLSSYIFFHGDLFWKHNYNLPFKSQLSYSWFDFHKSIQINPANPIMPSDARFVDKTKFNAKKTETFIIHPNPLQKKILLTWIDAFTDMMNETIKFQKNRLFHKKQLILDSRKLRDHNLKTIKNKIIARTGVNSHVMDQAIKLICEMYDSSIANIRNHKRPFRIRYIKKNKNKRILKIEKNSISKDGKTFCSSVFGKFLDNRLSNVTSDFTIQYDKSKDRFMLFYTKNANKIKTNKKDQIGLDPGIRTFLTGYSNNHAIKIADNAYDRISDIHNKIDEIRGSNLSKRRKIKALEKRESKIENLVKDLHWKTAKYLTDNYGEIIIGNFSTKKMGEQEGMNKMVKRVGNSLSLYKFKQKLQYKCLLKNVKYKEVDENHTSKLCSNCGVEYKWNLQGKKIYDCNYCGLHMDRDINGAKNIMIKSIIRK

SEQ ID NO: 4884 - protein, 462 aa, unidentified
  source 1..462: note = Catovirus CTV1
MTNKKKKFKFKKKKIFYKKYHNNNNNSLSRLLKDNQYYDLSSYIFFHGDLFWKHNYNLPFKSQLSYSWFDFHKSIQINPANPIMPSNARFVDKTKFNAKKTESFVLHPNSEQKKILLAWIDAFTDMMNETIKFQKNRLFHKKQLILDSRKLRDHDLKTIKNKIISRTGVNSHVMDQAIKLICEMYDSSIANIRNHKRPFRIRYIKRNKNKRILKMEKVLISKNGKTFCSSVFGKFLDNRLSNVTSDFTIQYDKSKDRFMLFYTKNANKIKTNKKGQIGLDPGIRTFLTGYSNNHAIKIADNAYDRISDIHNKIDEIRGSNLSKRRKIKALEKRESKIENLVKDLHWKTAKYLTDNYGEIIMGNFSTKKMGEQESMNKMVKRVGNSLSLYKFKQKLQYKCLLKNVKYKEVDESHTSKLCSNCGVEYKWNLQGKKIYECNYCGLHMDRDINGAKNIMIKSIIRK

SEQ ID NO: 4885 - protein, 725 aa, Hokovirus HKV1
MKKKKKKKNDFLDSQINNDNKIEYNLKTKKVIKNITNKNKLLNKLKNVKQKNVINESNIIINESDIIINESDIINESDIINNNTKKIRKKRSTNKKFDNSDISEKKLTKKEIIELEKIEQEKNNINNHIPPWESDDIKIYRNILHFPNSNIPEIINPINCNLFDSYVNKQSNNDFNNFLINNNYNFKELNNKDIEIQKINVERNEHINNIFNKYTKINENLTDAKNQDIKDIQEKYKKYKQNKKIIEGKNKINEIENDYVKKHSDNENIKNKTIKNANKLYDDKIKCVRGSIKSYKYRIIFSEEQKKIVLNWINICDNFYNFCVLRHKEQKVKGYINKNDPKSYNLDKDPHSIKTKVFEDYFNVYLKNNYKKFNHIKFKPLNVKNISDYHKDYQIDDILENKPLPYDMITDVLSEFSRNLKSNYTKVKQDPNFRFNMGPKDHYRTYKTIFVPKKSIGLNGLFFNYLGKIKKYNKNLIKVINENKINHDCKLSYDSLLDKFYLHVPQYVEHKKRTENKEKYVAIDPGEKVFSSFYAENSYGHLGINMREKILSLKNKIERIERILSKNKNKKNKKIRCKKKLRKKKHKLEEKIKNMVKEVHNKISLYLCKNYENIILPSFETSKMLRGKLNKKVKTVLQRQSHYKFKEHIKAKSEEYGSQIYIVTEEYTSQSCGICGKLSKNYKNRIKKCSFCKTKIDRDINGSRNILIKNMFNILCGAPRPQASY

SEQ ID NO: 4886 - protein, 840 aa, Hokovirus HKV1
MIFLLYHVIFIYNYTLMNFRKTLQKCKEKLQNNIINQNDSIWMPLDVRVCDNYHFKTDSFNLIVKYDSEHLEHNNTFHFNNYEHLQAKIVNVFFDKVQKSIIKTWMKLYKYTYDTVIQIFSHVYNLCNIYYKINFYDARKILTNFISYNCKNNYKFNYFYKLNKHTIRKFYFYRNNKLCNKEIKILKKQFTKIKFNNIYNSDNYINLFKILKEYRSEYVKYVKFYSANPIHFLNKLHFTDFYNKLQDEYKQLFINLKCPIEEIILQEKNINIPIFKYDDYNPYMKKYTDFIKNRDNINNYEEHNKIYRLYVNYENKLINKQKRLLEIRSKLIYTKLSVIVKLIDNVINTFYKHIYKIIEEKLPQQVNNFVDQVKLYKTNEQFRNKKNAILQKYGYKTTINYKNTINEMRKSSVGKKIIINEKKLLYKDIIKTNHVSIFEPKYTNSLRNNTNVSRHTIDLAVEKACANYKTCLTNLKNRNIDNFNLREIKLRKMIIDIEPNEFSKEGIRKNILGTTTGFYNGILFDFTTINKATILKYNEKLNKYTLHVPYINKNLSEDEKKEKIKILEKKLKMTKKQKKRNKRRRKEKIKKRNNKNKKKETIKNIKKEIKRIKKNNMEKTGEGTISLDPGVRKYLTGYSSEKKKNIEIRENIKIKKNCYKIYETTKKYGLSSGKKKKVKKKEKKEKKEKKVKREIKVISEKEKEKVKRKLENRSKKVYRQMTDFHNKVIKYLTENYASILIGDMSLKGILNKKTSKLKKKTKYLCTRLRIGMLRTKLKKKCEEKNLKYKLVNEAYTSKTCTKCGTINENLKSKETFNCNECKIIIDRDLNGARNIHLASL

SEQ ID NO: 4887 - protein, 662 aa, Hokovirus HKV1
MKKSKPKVKEKKKDKENFDFMKTNKDNINNVIKDDNINPIINELVSRTNKIVIHSYQFLRLYFIHLFHNNQPFPTLDKEFICDIFKVITKRKCNSGGYRDDNMPEQLKTLTTFYREHYSKTIIKDEILYYDKLSYILAYEAIDMITNINNNIQEHFIDHLNKYVNIIFDVKKQRDEITKANKDKELRKQLHKALYEDINKVKKDLVSFDTLTSNEKYHKWIIEQRIKLFSNKNKFEENNIYYELKSNTQYFLHSMFYICNELEKLNNVKIEKEEEKQIRLFNVLPLRTNIIPKNICIDTCALISNFLGDEATSEYLKTYKKENKYNELWSKFFDLSKRVFKKGKKYTFSHMIRTDGISVCILFIRVDVNGKPLSKTYQNKKCCQEENINYIEKTEITEELKNMKVVCADPGMSDLLYFGSYNEKNELETFRYTQNQRRLETRNKKYNKIIDKVNKETFINDKTIKDLETTLSNLNSKSCNYEKFKLYCIEKNKINNQLYTHYEKSFFRKFKLNAFTNTQKSESKMIKNFENKYGKPNKTILVVGDYDKGDNNMKGKEPTICKKFRRIFRNAGYKTYLVNEFRTSKLCNCCNEEIEKFLKKPSKKPKRKGEIDLCHGILRCKSVKHNCEIYHNRDKNAVQNMLKIVKSIFNTGKRPEVFCRSS

SEQ ID NO: 4888 - protein, 577 aa, Klosneuvirus KNV1
MVINVKRPPNIYYYKLYLNLVFDSDIVTFHDHIPIKFTLLTEFKTYNQQCDKVPFIPSIINKIIRYNANYNYSVKEIIKIFNVFRKKNLEFIPSLIKVCSKDLLCIPFWNAYTKLLSDKLYLPTLNDLVKTINKTLDNSWFKANEFVNNKNAYKLNFKKVNYEECILTKTRKINIYFNKSQKKYMRQIIGIYRYFYNRCVSFLNNYDKKTRISKYYINSKNKMSLIIVKVPETINPYSFISMRPILKQHIPTWLLKDFPEHLIDQALNEAFVRFKICLDRCIKTGKQFEFKYKQSKENVHTINLEKSMIHKTNSLFRNWKINDNYLFRNLKTSERFHMYNFKGSTLSYHRILKKYTLNLSYEEKTYKHYIPHRIGAGDPGQRTFLTIYSTDKVIEVGNNGCNKLFNICKEIDIIQSRLNCKEYYTQINNEKIIYKMNHNRRRNLKKALHNKIQYLKNLKTELHNKSIKYICDNYSTIILPPYEIQNMVGKLHSVIARGMYNLAYYTFREKLVAKSKEYNIKVLIKPEYYTTKTCGQCGILNHNIGTNKVFNCPICKLEMGRDQNAARNNLLRNIKYT

SEQ ID NO: 4889 - protein, 511 aa, Klosneuvirus KNV1
MCQWYKKNVKKLSDNLWLPLITDEIDYKPKYSFTQTTSINFEAKTNKNLIKNNIDYVSNQNDIKTYMEHFNKKINKINDSNLNNDEKKKKKIKLYDEQIKMFEHYNDVIKTTQIHLNLNKEQKSTIENWLIECDNVYNYCVKKYNDNPYSFDINYKSLKLEVFNQLYGTNKKPCPYDMLTDEVRIFCSNLKSCQSNLANGNIKHYTMKRRNTIYSQSILIPKNSITKTGIFPSFLGDIKGFKLDSEYANCDSRLLIDKIHKKYILCIPQYQKKFFEKQTEKIINNIEYKQIYDKEINEIGAIDLGERIPFTIYSENHYVKIGEDIRKNILDYQMRIRQMQRALSKNINKNNKRLMNKKKLKLKIRLTYGHIKNLVKELHNQTANYLVKNYKKILIPEFRTQEMIKNVNSTDNKQKARVNKLDKRVKFVLLMLSHYRFRQHLTNKCVEYGCQIDVVTEEHTSMCCTNCGSLSKKYNGREKHCDKCGYKINRDVNGARNILLKNARQHIKLRL

SEQ ID NO: 4890 - protein, 359 aa, Klosneuvirus KNV1
MNYKSLKLEVFKQLYGTNKKPCPYDMLTDEVRIFCSNLKSCQSNLANGHIKHYTMKRRNTNYSQSILIPKNSITKTGIFPSFLGDIKGFKLDSEYANCDSRLLIDKIHKKYTLCIPQYQKKFFEKQTEKIINNIECKQIYDKEINEIGAIDLGERIPFTIYSENHYVKIGEDIRKNILDYQMRIRQMQRALSKNINKKNKRLTNKKKLKVKIRLTYRHIKNLVKELHNQTANYLVKNYKKILIPEFKTQEMIKNINLTDNKQKARVNKLDKRVKFVLLMLSHYRFRQHLTNKCVEYGCQIDVVTEEHTSMCCTKCGSLSKKYNGREKHCDNCGYKINRDVNGARNILLKNAKQHIKLRL

SEQ ID NO: 4891 - protein, 663 aa, Klosneuvirus KNV1
MSVVEETKKKPPDYFKCVKIPIKHVLKNPDTNSPKITNGVIKSNKIIIHTLLFMKLYLLNYYEKNNKLPIIDKVFVNSCMKILCNENANGRPPKKEVKELKDTLTKFYNKEYKPLIQNDPLDYTHLNTVLDYLTVDIITMYENNIKLHYVEYVERYVNVMWKKKDTINKIKEDNKDETTQKELINEFCRQLRKIKLDILETTDKLTSDDKYHQWIQDKKKLITPNKAKYNKDNLYYDLQCNPQNYLQCMIKMMKEIEKEGVTINNVFPMRNTVTPHHIRLDTTTLVHLLFTSKQGNKTDYLLDGNLKKHENDIWKFFFRTERQCFKKPNYTFHHMIETDGVSCSILFIRNDLIGKRIPSNKIGTSEQYIDELADYSDLKNKKIVAIDPGKSDLLYCVDSDDKNANEFRYTQDSRRKECKIKKYAKIILEFKKEKIGNKTITQYETELSKLNRKTLDIKEFKKYIKKKCDINHKLFKFYEKYIFRKLKLNGYLNRKKNEQKMINNFKKIFGKPDNTIICIGDFEQKTHMKYKEPTKGIGLRKLLKQAGYKIFLVDEFRTSCKCSKCGGGTCEKFLTRKNPKPYKSGNMLVHGLISCKNCSNVWNRDVNGATNIYKIAKNAINGIERPKYLCREKKDEEVKQVKKKVVQKKQVKKSVRVDALTKS

SEQ ID NO: 4892 - protein, 799 aa, Klosneuvirus KNV1
MNKHISIKVKLEKLLWKKMNYDNLYDAITRTNILIDNGSLFIRSYILYVIEYNKNNEEKISEPIVDIDFIRMAFSIISNDDSPKKGRPFNENKTYLLNQLKTYFAIFKEKTNMEITNANKLSYILGQTYEQIYISIINNIIYHFDKHVWKFIKASNLSEYGSIKIANDSNKLTEFYSEMAKIKNDLFNNSLTSNIKYHDWINSIRQFIIPYTYIETKFETDVNKNTFSYLKCMQYINNYIQSKDLKSYQIFPLKTSCYNNHVKINTSALIDLFYGSSKLNELTKYDYLSITGDTKFQEKVWNDIFHFKNTMGKYMYKHTNYSFNYEIETDGFAVSLNFIQNNEIENKEKRKKNFKLARQKTNLNKQNKTKTEYDIDLKIKQDNKLQSKEDQLKTTKQRTLDSKKEFKKLSKEDQEKLKNKLNDKNEFPYIDKVLMDEDKRKLFEEDFINGNLIYCDPGKRSPLYLMASNNKIHMKEKELVTNNFGVSIWNNHKIMNYTNNTRQLFFKKKEYSKLIENWKKNNSSKKFRAEIKKIFNNEYETFEELEEVILYNIKSLKEMEIELSNCNKKSCIHDEFLKYVIKKLEYNNKVKKQYDTSYLEKLNWYTYLNKNKHENELLNQIENEFGKDIKIIIGDWSGKGCVKYMSTPNISLKRKLAERFKVYLIDEYLTSKIHYNHKIRCENLKIKSEEKEVNSYQSNKQFNTSFKRLHSILTYKIVKEEMGCKKIEMGCINRDKNSVLNMETIVKGLLENGKRPDIFSRKETNHYDRKVNHNDARGTNRRNEKLIKQIESDTKNKSI

SEQ ID NO: 4893 - protein, 209 aa, Acanthamoeba castellanii
SPRVSSRKIVGIDPGLEISFTVYSENETQSICPIEIVVNTTKNEYKKIDKINEIIKTKPNLNSKRKKKLNRGLRKYHRRVTNKMKDMHYKVSHELVHTFDKICIGKLNVKSILSKANTVLKSALKRKLATLSFYRFTQRLTHMGYKYGTEVVNVNEYLTTKTCSNCGKIKDLGASKIYECESCGMYADRDENAAKNILKVGLKPWYKQK

SEQ ID NO: 4894 - protein, 238 aa, Acanthamoeba castellanii
MIDKTVTLQYDSDTRKYILFVPRVTPKYSVNKEKNSCGIDPGLRDFLTVYSENETQSICPIEIVVNTTKNEYKKIDKINEIIKTKPNLNSKRKKKLNRGLRKYHRRVTNKMKDMHYKVSHELVNTFDKICIGKLNVKSILSKANTVLKSALKRKLATLSFYRFTQRLTHMGYKYGTEVVNVNEYLTTKTCSNCGKIKDLGASKIYECESCGMYADRDENAAKNILKVGLKPWVQTKIV

SEQ ID NO: 4895 - protein, 521 aa, Acanthamoeba castellanii
MKEAVKTVKPKVPAKKRIITGSKTKKKVFVKKKQPAKKPPDKKPVKKIVKTDKPKSIYVPNKDLKISKWIPIPKKEFIEIETNSWYEHRKFENPNKSPVQTYNKIVPVVPPESIKQQNLANKRKKTNKSIVFISSEKIRIYPTRDQQKILQTWFRLFAYMYNSSIDYINSKKVVLESGRINVTATRKVCNKISVRKALKTTRDNLIQSTNPSIMTHIMDEAIGLACSNYKTCLTNYIEGQIKKFDIKPWSISKRRKIIVIEPGYFKGNSFCPTVFPKIKSSKPLTMIDKTVTLQYDSDTRKYILFVPRVTPKYSVNKEKNSCGIDPGLRDFLTVYSENETQSICPIETVVNTTNNEYNKIDKINEIIKTKPNLNSKRKKKLNRGLRKYHRRVTNKMKDMHYKVSHELVHTFDKIYIGKLNVKSILSKTNNVLKSTLKRKLATLSFYRFTQRLTHMGYKYGTEVVNVNEYLTTKTCSNCGKIKDLGASKIYKCESCGMYADRDENAAKNILKVGLKPWYKQK

SEQ ID NO: 4896 - protein, 527 aa, Acanthamoeba castellanii
MKEAVKTVKPKVPAKKRIVTGSKTKKKVFVKKKPPAKKPPDKKPLKKTTKKTVKKVINRPKSIHIPNKDLKIFKWIPTPKKEFTEIETNSWYEHRKFENPNGSPIQSYNKIVPVVPPESIKQQNLANKRRKTNKPIVFISSEKIRIYPTKEQQKILQTWFRLFACMYNSSIDYINSKKVVLESGRINVAATRKVCNKISVRKALKTIRDNLIQSTNPSIMTHIMDEAIGLACSNYKTCLTNYIEGQIKKFDIKPWSISKRRKIIVIEPGYFKGNSFCPTVFPKMKSSKPLIMIDKTVTLQYDSDTRKYILFVPRVTPKYSVNKEKNSCGIDPGLRDFLTVYSENETQSICPIETVINTTKNEYNKIDKINEIIKTKPNLNSKRKKKLKRGLRKYHGKVTNKMKDMHYKVSHELVHTFDKIYIGKLNVKSILSKANTVLKSALKRKLATLSFYRFTQRLTHMGYKYGTEVVNVNEYLTTKTCSNCGKIKDLGASKIYECESCGMYADRDENAAKNILKVGLKPWYKQK

SEQ ID NO: 4897 - protein, 520 aa, Acanthamoeba castellanii
MKEAVKNVKPKVPAKKRIITGSKTKKKVFVKKKPPDKKPLKKPVKKTVKTDKPKSIYVPNKDLKISKWIPTPKKEFTEIETNSWYEHRKFENPNKSPVQTYNKIVPVVPPESIKQQNLANKRKKTNRPIVFISSEKIRIYPTKDQQKILQTWFRLFAYMYNCTIDYINSKKVVLESGRINVAATRKVCNKISVRKAQKTIRDNLIQSTNPSIMTHIIDEAIGLACSNYKTCLTNYIERHIKKFDIKPWNMSKRKKIIIIEANFFKKGTFCPTVFPKMESSKPLTMIDKTVTLQYDSDTRKYILFVPRVTPKYSVNKEKNSCGIDPGLRDFLTVYSENETQSICPIEIVVNTTKNEYKKIDKINEIIKTKPNLNSKRKKKLNRGLRKYHRRVTNKMKDMHYKVSHELVNTFDKICIGKLNVKSILSKANTVLKSALKRKLATLSFYRFTQRLTHMGYKYGTEVVNVNEYLTTKTCSNCGKIKDLGASKIYECESCGMYADRDENAAKNILKVGLKPWYKQK

SEQ ID NO: 4898 - protein, 545 aa, Acanthamoeba castellanii
MAKTTNGKFWNDECEKVSDLLWKPNLIVNHKPQERINFKCDNKYITFNYYSNNVPINDQLKFKDIPQSNNTDKKNKLMDKLLKIEDSRYKKDIESNKTRKIKLTKEQLTAKHNTQLLKIQNKISQLDGFIRSRRIQLLPNDFQKNIFNIWFNETTVIYNRLLTEFTQYYIKFKEIASDNKELVKLLRTNEEFPLSLQKLRNLKIHDIINIYLEDQLIHKLETPFCVIANTIKEFVANVKGNLTKLAENKIDKFTFKHKNFNGKIRTISIDSKYASENSFYPDKLGKLLQTYEDLKGFSWKNVKHDFKIVYDKYNNKYYAHIPKYVYRNLNILNKKPITVMDPGERTFQTLYGLDHVISIGDNLRETISKRLLRIDNLKSKLDTPGSKKHNLKLNRKTRVRKCRYKKAIDRHHKKIEHLQRELHYKTAIYLCENYQRIMVTDFSSKKVSSKDGDLDAMSKRILGKISHYRFRQRLQQKCEEFNCQYLEVNEAWTSKTCCNCGYIHAKLGTSKIYDCPKCKQKRDRDVNGAINILLKNRKLVLMEDQ

SEQ ID NO: 4899 - protein, 482 aa, Acanthamoeba castellanii
MVYNQDLSISNKTCGISDWLPPVRNKKISDIKSNSWFDIRRCLNPNIKTKFVPVNNKQIVLKEPNCIYLKYDLITLNPSSDHIRILREWFSLYAKIYNYAINLIRKMFYVNNKLIKSRLQCEIYDEIIIRKLSNDKTKLIESLKLSDRPPEFLLDYAISHACTYCNSQVKKYLKDSKNPYNKKTLRFRLWSLHKSRRVMHILPPKLCDKNVCNGLFLKLNPSKNIHDIYMFCVMSWDRLTGKFFVYKPVLKRLINIPKKQFTRCGIDPGVRTFLTLYSSERTYDVCDSTFYNNKIKRMWRKIDRINFLLHNRKKRKKRKNDRRLRKSLAKYYRKIRQRIKDLHTKTAKYLVSRYKEIYIGIYDTSKNLSDPRISFYEKRRIATLNHELFLTKLQQVADRFGSSVFAINEHMTTKTCSKCGRINEIGSSKVHKCACGMYAGRDENAAKNILKKGIKEHYLSAQSDKNVTEYNNKKSNNTNKET

SEQ ID NO: 4900 - protein, 545 aa, Acanthamoeba polyphaga mimivirus
MAKTTNGKFWNDECEKVSDLLWKPSLAVNHKPEERDNFKCDNKYITFNYYSDNVLINNKLKFKDIPQLNNTEEKNKLMDKLLKIEDSRYKKDIESNKIRKIKLTKEQLTAKHNTQLLKIQNKIGQLDGFIRSRRIQLLPNDFQKHVFDIWFNETTVIYNQLLTEFTQYYIKFKEIASDNKELVNLLKTNTEFPLSLQKLRNLKIHDIINIYLEDQLIHKLETPFCVIANTIKEFVANVKSNLTKLAENKIDRFTFKHKNFNRKIRTISIDSKYVSENSVYPDSLGKLLQTYEDLKGFSWQNVEHDFKIVYDKYDSKYYAHIPKYVYRNPNVLNKKPIVVMDPGERTFQTLYGLDHVISIGDNLRETISKRLLRIDSLKSKLDTPGSNKYNLKLNRKTRVRKYRYKKAIDRHHKKIEYLQRELHYKTAIYLCENYQRIMVTDFSSKKVSSKDGDLDTMSKRILGKISHYRFRQRLQQKCEEFNCQYLEVNEAWTSKTCCNCGYIHAKLGTSKVYDCPKCKQKRDRDVNGAINILLKNRKLVLIEDQ

SEQ ID NO: 4901 - protein, 479 aa, Acanthamoeba polyphaga mimivirus
MVHNQDLSISNKSCGISDWLPPIRNKKTSDIKSNSWFDIRRCLNPNIKTKFVPVNNKQIILKEPNCIYLKYDLITLNPDLGHIRILREWFSLYAKVYNLAINLIRKMFYVDNKLVESKLQHEIYDEIIVRKLSNDKIKVIESLKLSDRPPEFLLDYAISHATMYCNTQVKKYLKDSKNPYNKKKLRFRLWSLHKSRRVMHIFPPKLCNKDVCNGLFLKLKPSESIHDIYMFCVMSWDRLTGKFFIYKPVLKQLVNIPKKQFIRCGVDPGVRTFLTVYSSERTYDVCDSTFYNNKIKRMWRKIDRINFLLRNRKKRKKRKNDRHLRKSLAKYYRKIRQRIKDLHIKTAKYLVSRYKEIYIGIYDTSKNLSDPRISFYEKRRIATLNHELFLTRLQQIADRFGSSVYAIDEHMTTKTCSKCGRINEIGSSKVHKCECGMYAGRDENAAKNILKKGIKEHYLSAQSDKNATEYNNKKSHKII

SEQ ID NO: 4902 - protein, 464 aa, Acanthamoeba polyphaga mimivirus
MKIEDTRYKKDIESNKTRKIKLTKEKLTAKHNTQLLKIQNKIGQLDGFVRSRRIQLLPNDFQKHILNIWFNETTVIYNQLLTEFTQYYLKFKEMAKNNKELVNLLKTNTEFPLSLQKLRNLKIHDIINIYLEDQLIHKLETPFCVIANTIKEFVANVKGNLTKLVENKIDRFTFKHKNFNRKIRTISIDSKYVSENSVYPDKLGKLLQTYEDLKGFSWQNVEHDFKIVYDKYDSKYYAHIPKYVYRNPNVLNKKPIVVMDPGERIFQTLYGLDHVISIGDNLRETISKRLLRIDDLKSKLDTPGSKKNNLKLNRKTRVRKCRYKKAIDRHHKKIEHLQRELHYKTAIYLCENYQRIMVTDFSSKKVSSKDGDLDSMSKRILGKISHYRFRQRLQQKCEEFNCQYLEVNEAWTSKTCCNCGYIHAKLGTSKVYDCPKCKQKRDRDVNGAINILLKNRKLVLIEDQ

SEQ ID NO: 4903 - protein, 521 aa, Acanthamoeba polyphaga mimivirus
MKEAIKTVKPKIPAKKRIITGSKTKKKVFVKKKPPAKKPPDKKSVKKSVRTDKPKSIYVPNKDLKMSKWIPIPKKEFTEIETNSWYEHRKFENPNKSPIQTYNKIVPIVPPESIKQQNLSNKRKKSNKPIVFISSEKIRIYPTKDQQKILQTWFRLFASMYNSTIDYINSKKVVLESGRINVTATRKICNKISIRKALKTIRDNLIQSTNPSIMTHIMDEAITLACSNYKTCLTNYIEGHIKKFDIKSWSISKRRKIIVIEPGYFKGNSFCPTVFPKMKSSKPLTMIDKTVTLQYDSDTRKYILFVPRVTPKYSVNKEKGSCGIDPGLRDFLTVYSENETQSICPIETVVNTTKNEYKKIDKINEIIKTKPNLNSKRKKKLNRGLRKYHRRVTNKAKDMHYKVSHELIHTFDKIYIGKLNVKSILSKANTVLKSALKRKLATLSFYRFTQRLTHMGYKYGTEVVNVNEYLTTKTCSNCGKIKDLGASKIYECESCGMHADRDENAAKNILKVGLKPWYKQK

SEQ ID NO: 4904 - protein, 482 aa, Acanthamoeba polyphaga mimivirus
MVYNQDLSISNKNCGISDWLPPIRNKKTSDIKSNSWFDIRRCLNPNIKTKFVPVNNKQIVLKEPNCIYLKYDLITLNPSSDHIRILREWFSMYAKIYNHAINLIRKMFYVNNKLIKSRLQCEIYDEIIVRKLSNDKTKLIESLKSSDRPPEFLLDYAISHACTYCNSQVKKYLKDSKNPYNKKTLRFRLWSLHKSRRVMHIFPPKLCDKDVCNGLFLKLKPSKNIHDIYMFCVMSWDRLTGKFFVYKPVLKRLSNIPKKQFTRCGIDPGVRTFLTLYSSERTYDVCDSTFYNNKIKRMWRKIDRINFLLHNRKKRKKRKNDRRLRKSLAKYYRKIRQRIKDLHTKTAKYLVSRYKEIYIGIYDTSKNLSDPRISFYEKRRIATLNHELFLTRLQQVADRFGSSVYAINEHMTTKTCSKCGRINEIGSSKVHKCACGMYAGRDENAAKNILKKGIKEHYLSAQSDKNVTEYNNKKSNKTNKET

SEQ ID NO: 4905 - protein, 529 aa, Acanthamoeba polyphaga mimivirus
MIHNHKIIMKEAVKTVKSKVPAKKRILTGSKTKKKIFVKKKPPVKKPPDKKPVKKTVKTDKPKSIYVPNKDLKMSKWIPTPKKEFTEIETNSWYEHRKFENPNKSPVQTYNKIVPVVPPESIKQQNLANKRKKSNKPIVFISSEKIRIYPTKYQQKILQTWFRLFASMYNCTIDYINSKKVVLESGRINVAATRKICNKINVRKALKTTRDNLIKSTNPSIMTHIMDEAIALACSNYKTCLTNYIEGHIKKFDIKPWSMSKRRKIIVIEPGYFKGNSFCPTVFPQMKSSKPLTMIDKTVTLQYDSDTKKYILFVPRVTPKYSVNKEKNSCGIDPGLRDFLTVYSENETQSICPIETVVNTTKNEYKKIDKINEIIKTKPNLNSKRKKKLNRGLRKYHRRVTNKAKDMHYKVSHELVHTFDKIYMGKLNVKSILSKANTVLKSALKRKLATLSFYRFTQRLTHMGYKYGTEVVNVNEYLTTKTCSNCGKIKDLGANKIYECEFCEMHADRDENAAKNILKVGLKPWYKQK

SEQ ID NO: 4906 - protein, 527 aa, Acanthamoeba polyphaga mimivirus
MKEAVKTVKPKVPAKKRIVTGSKTKKKVFVKKKPPAKKPPDKKPLKKTTKKTVKKVINRPKSIHIPNKDLKIFKWIPTPKKEFTEIETNSWYEHRKFENPNKSPIQTYNKIVPVVPPESIKQQNLANKRKKTNRPIVFISSEKIRIYPTKEQQKILQTWFRLFACMYNSSIDYINSKKVVLESGRINVAATRKVCNKISVRKALKTIRDNLIKSTNPSIMTHIMDEAIGLACSNYKTCLTNYIEGQIKKFDIKPWSISKRRKIIVIEPGYFKGNSFCPTVFPKMKSSKPLIMIDKTVTLQYDSDTRKYILFVPRVTPKYSVNKEKNSCGIDPGLRDFLTVYSENETQSICPIETVINTTKNEYNKIDKINEIIKTKPNLNSKRKKKLKRGLRKYHGKVTNKMKDMHYKVSHELVHTFDKIYIGKLNVKSILSKTNNVLKSTLKRKLATLSFYRFTQRLTHMGYKYGTEVVNVNEYLTTKTCSNCGKIKDLGASKIYKCESCGMYADRDENAAKNILKVGLKPWYKQK

SEQ ID NO: 4907 - protein, 698 aa, Bodo saltans virus
MKKPKVKEKEKEKEKENFDFMKTNKGNIHKLIKDKMVLSIIDELVVRVNKIVIHAYQFNKLFCSYLYNNHFPLPFLDKEYICDIFRVITKRKCGKGGYTEDKMPVQLKILNDFYKNHYSKLVQPTEILYYDGLSYILAYEAIDIITNINNNIEMHFIDHLNKYVNIVFNVKQQAEQITNNNKDKTIRKELHKKLYDEFRKVKNDLISFSDEFTSDKKYHKWIIQQRSSIFKDKIEFEKNSIYYDIKVNTQDYLYSMFYIANEFEKMNEKINNDNEINNTNNKLIRLFNVLPLRKSNIPKHITIDTCGLIQNFMGNESTTKLLQNYSKENKFYELWNRFFMLNKRAFKKEKGKYIFNNMIRTDGISCCVLFVHVDKNGKPMKKTFQNKNSDDEMNTDYIEKATITDEMRKMQKVAADPNLADLIYCGARDNDGNLKTFRYTQNQRRLETRNKKYNKIIDNMNKHTLLPVNKKIIDEFNNKENKKIDVVLKILKINKLSIKELESILSEHNSKTINYDKLNKYISKKNEVNNIMKEHYEQKVFRKLNLNRFINTQKSESKLIKNFIKVFGNPKDVIFIMGDYDKGSYNMKRKEPVICKKFRRIFKNAGFMTFLINEFRTSMLCNGCKGELEKFMKRLSHKPKMYKEGKEELVHGLLRCQSIKHECEIYHNRDKNSVQNMLNIVEYIFKHGIRPKEFSRTE

SEQ ID NO: 4908 - protein, 702 aa, Bodo saltans virus
MKKPKEKIKVKDKENFDFMKTNKDNINNVIKDTTILPIIDELVNRVNKIVIHAYQFLKLQCIYLFKNNQSFPIIDKKYICDIFKVITKRKCNFGAYTENNMPEQMKTLNDFFKNHYSKLITVDEILYYDKLSYILAYEAIDMVTNINNNIEMHFIDHLNKYVNIVFDVKNKADQITKDNKNKIIRKELHKQLYDEFKKVKNDIIAFGEFTSDKKYHDWIKDQKLKLFGSKTKFEKDSIHYDLKSNTQDYLKSMFHIANELEKINDKIMENNEKNGTENKQIRLFNVLPLRKNIVPKHITIDTCGLIQNFLGEESTSEHLKNYKKNNEYHILWDRFFDLKKRTFKKNKYTFSHMIKTDGISCCILFVRIDVNGKALKKTFQNKQCSEEINTDYIENTVITEEMKQMKPVCTDPNYGDLIYCGAKDENGNLQTFRYTQNQRRLETRNKKYNKIIDSINKSTEISVNKNLIGEYNVIVKNHNENIKKSNNKKIKEKKEKVDKLTIKELETILSKFNSKTNNLDKINKYVSKKNEINKILNEHYAQKVFRKLQLNIFINTQRSESKMIQNFIKVFGNPEDTIFIIGDYDKGSYNMRGKEPAICKKFRRIFKNDGFMTFLINEFRTSMLCNECCEELEKFHKRLSHKPKLFKEGKSELVHGLLRCQSVKHECEVIHNRDKNSVQNMLNIVKSIFETGFRPKKFSRTE

SEQ ID NO: 4909 - protein, 826 aa, Bodo saltans virus
MILKKGKDYKPSLDNEQYEKLFNFYINTFSQYYFNPNGKDKLICSERIDQIMKLNLKNTLTNFDNNIIYSHEKYINRFIKCYLNNVFKNKLEYNRQIKKASTYEMIKRHNKTDLCGNKIVNVMDFYLDFFKMQKKYNIDYDDRVLKQFNTYLGEKIEKKYIIRSANNFFKEDLDKIKAFEENLSEYKKRIKKILIENEPINENDPQFIKDIITIKNSIIPTIVKSYKDDLKKNPYNFIGGMIYINNYLEKIQSKTFNVFPTRKNFIPRNIIIDATSMNVAFCKNSFKNITNNKLEIYKTIFSFPDNYYKLNGYVFSGTIHTDGVSISLIFETDEKYKESLKVKKIKNDAKNIELRNKKNAEDKLYKEYNIVEIQNFIKNNEKILKNLKEKIDEDEIFKVSSSIDESKRMLDEFNKEIKKRMNKYINDTRKEKEEKNLNKEEKKDKKKEEDKKEYVKKIKKLKEESEGDELRKINRKGKEFYYLDDLTEEELKKVEKSKKMYIDQGKINLIYVLIEKDGKDVFIKYSGKERAFNLKTKEHIKNMKKMYLNYGITKEQQESIEINKKSSNAETIKSNMEQINKTFMATYEKYLNEKLRKEKLEIYIDKQKAEKSLINKIVKQLGLTNINELKEYTLIIGDWKGNNSLKNSKSTLGIGMKRLLKKYVKEMYLIDEYNTSKICNMLHEEEVKTEEKIMELKSISKKGEVKIISKKMHEILTFKMQKQRILCKKNFIYDDTNEEKVTIEGKDIIQINRYIQRDKNAVLNFRTILSHYILNNRERPKAFVRSEKSTCRGSKPRKATVAKESYSSSIGEPKKLKKKKAKKVKT

SEQ ID NO: 4910 - protein, 657 aa, Bodo saltans virus
MMRRFIPRTSDNEFIVLADNISTYSTHYVDISTIPAYSTNIKTNSWFTNLCSNYSLPYHKPSFNFSKCENVVPNRKTIKINMNLNNRQKLILDKWFHSSNLMYNQTIIFLRKHISYCSIQNYNSLHKLMPKYYENCKNIKNTQHILYKKQMLYSSVLVKLEKLYITDNKTKKEYSQIITLKKKISEINIQITKLNIELDTYSKKNIDLSKQYHNYVQLEKHINTFLSYEHIRTKYLKKIRDNIALKYSCYNDDRKYKIHTHSLDGAIKQACAHYKTCITNLLDGNIKRFRVRCRNSDNPKKLVEIDSESFNGSENDYCICKKILGNIDYTYNNNKYTLSTKQTSTIYFDGSKYTLLMPIYIEKPFATVRKPYTALDGGVRDFLTGFDNNSLKNYGHNVANVLYKYFNKIDKLKSVSYMGDNTNLLNYKNKLMSKKNYLEDVYICDKLEEIEEQLKYKSTSIEKIIENCKRIIKNNEKLINVSKDKNKIIKLYASINFNKYRIEKLSKMNEKEREKYTKYINYKKANKVQFLNKKIKWKIDELHWKIARELCENYEMIILGKLDTQSILKNKDLNKGTKRVLQSLSHYKFRERLVYKALSLGCKIIVQNEKYTTKTCTLCGHYNEWVTTEHSIDCKGCKKTYNRDNNGARNIFLKSLI

SEQ ID NO: 4911 - protein, 835 aa, Bodo saltans virus
MILKKGKDYTPSLDNEQYEKFFNFYINTFSQYYFNPNGKDKLICSERIDQIMKLNLKNTLTNFDNNIIYSHEKYINRFIKCYLNNVFKNKLEYNRQIKKASTYEMIKRHNNTDLCGNKIVNIMDFYLDFFKMQKKCNIEYDDRVLKQFNTYLGEKIQKKYIIRSANNFFKEDLDKIKTFEENLSEYKKHIKKILIENEPINENDPQFIKDIITIKNSIIPTIVKSYKDDLKKNPYNFIGGMIYINNYLEKIQSKTFNVFPTRKNFIPRNIIIDATSMNVAFCKGSFKNITNNKLEIYKTIFSFPDNYYKLNGYVFSGTIHTDGVSISLIFETDEKYKESLRVKKIKNDAKNIELQNKKNAEDKLYKEYNIVEIQNFIKNNEKILKNLKEKKDEDEIFKVSSSINKGKKMLEEINIEIKKRMNKYINDTRKEKEEKNLNKEEKKDKKKEEDKKEYVKKIKKLKEESEGDELRKINRKGKEFYYLDDLTEEELKRVEKSKKMYIDQGKINLIYVLIEKDGKDVFIKYSGKERAFNLKTKEHIKNMKKMYLNYGITKEQQESIEINKKSSNAETIKSNMEQINKTFIATYEKYLNEKLRKEKLEIYIDKQKAEKSLINKIVKQLGLKNIDELKEYTIIIGDWKGNNNLKNSKSTLGIGMKRLLKKYVKEMYLIDEYNTSKICNMLHEEEVKTEEKIMELKSISKKGELTVISKRMHEILTFKMDKKIQLKMQKQRILCKKNFIYDDKKNEVKKFLHNNKNEEKVIKEGKKVIQINRYIQRDKNAVLNFRIILSHYISNNRERPKAFVRSENESKNKKSTCLGGKPKIATVVKKASVAV

SEQ ID NO: 4912 - protein, 657 aa, Bodo saltans virus
MMRRFIPRTSDKEFIVLADNISTYSTHYVDISTIPAYSTNIKTNSWFTNLCSNYSLPYHKPSFNFSKCENVVPNRKTIKINMNLNNRQKLILDKWFHSSNLMYNQTIIFLRKHISYCSIQNYNSLHKLMPKYYENCKNIKNTQHILYKKQMLYSSVLVKLEKLYITDNKTKKEYSQIITLKKKISEINIQITKLNIELDTYSKKNIDLSKQYHNYVQLEKHINTFLSYEHIRTKYLKKIRDNIALKYSCYNDDRKYKIHTHSLDGAIKQACAHYKTCITNLLDGNIKRFRVRCRNSDNPKKLVEIDSGSFNGSENDYCICKKILGNIDYTYNNNKYTLSTKQTSTIYFDGSKYTLLMPIYIEKPFATVRKPYTALDGGVRDFLTGFDNNSLKNYGHNVANVLYKYFNKIDKLKSVSYMGDNTNLLNYKNKLMSKKNYLEDVYICDKLEEIEEQLKYKSTSIEKIIENCKRIIKNNEKLINVSNDKNKIIKLYASINFNKYRIEKLSKMNEKEREKYTKYINYKKANKVQFLNKKIKWKIDELHWKIARELCENYEMIILGKLDTQSILKNKDLNKGTKRVLQSLSHYKFRERLVYKALSLGCKIIVQNEKYTTKTCTLCGHYNEWVTTEHSIDCKGCKKTYNRDNNGARNIFLKSLI

SEQ ID NO: 4913 - protein, 626 aa, Bodo saltans virus
MKKKPDKIYRIIKVPLDYVFRNIYSYEYKVLQENIIKCNKIFTYSLEFLKLYCLHSYEINNIFPTINSNLIRCILNIITTNPRVTTNEKKEITEFKIILMKIYNEHFKDEYIDINICSTGLKTLFEYMIIQILTIYENNIKLHYCDYVKRFINWFCNKKRFIEHYQKTKNKIGEKTFIANLKKIHYDVLNVNIDDNSYKTNVAFHDLVKIIKSIVLPKKTFIKSLYYDLECEPLKYLENMHIMMLIINNDNKCIYNVYPLRTSIIPKYMKLDTTTLINLLMETDKSHYLREGNLVKLADESWNKFFKLDNKVFKLKGYKFDHSILTDGVGCSIQFIKEEYYNKFVPNKKKITETYEYIDELEKEDYKRLKEKQIVAIDPNKGDLIYCVDGIEKERNQFRYTQDQRRKELKIKKYKKIREKLKKEEIIDGKTVEEWEAELSEKNRKELKFAEYKIYLKEKHKLNKKLEEFYEKRLFRKLNLNGYLNKKQSDQRMIKNFKEKFGESEKVVICIGDWSEKEQMKNKEPTKGKGMRKTFEENGFELYLVNEYNTSCKCNVCEGECKIFCKGENPRPWKNNKIPIHGLLKCKTCKVLWNRDENSSCNIYKISKLAIEGKQRPLYLTNKMDK

SEQ ID NO: 4914 - protein, 657 aa, Bodo saltans virus
MMRRFIPRTSDNEFIVLADNISTYSTHYVDISTIPAYSTNIKTNSWFTNLCSNYSLPYYEPSFNFSKCENVIPNRKTIKINMNLNNKQKLILDKWFYSSNLMYNQTIIFLRKHISYCSIQNYKSLHNLMPKYYENCKNMKNTKHILYKKQMLYSSVLVKLEKLYITDNKTKKEYSQIITLKKKISEINIQITKLNIELDTYSKKNIDLSKQYHNYVQLEKHINTFLSYEHIRTKYLKKIRDNIALKYSCYNDDRKYKIHTHSLDGAIKQACANYKTCITNLLDGNIKRFRVRCRNSDNQKKLVEIDSESFNGSENNYCICKKILGNIDYTYNNNKYTLSTKQTSTIYFDGSKYTFLIPIHIEKPFATVRKPYTALDGGVRDFLTGFDNNSLKNYGHNVANVLYKYFNKIDKLKSVSYMGDYTNLLNYKNKLMSKKNYLEDVYICDKLEEIEEQLKYKSTSIEKIIENCKRIIKNNEKLINVSNDKNKIIKLYASINFNKYRIEKLSKMNEKEREKYTKYINYKKANKVQFLNKKIKWKIDELHWKIARELCENYEMIILGKLDTQSILKNKDLNKGTKRVLQSLSHYKFRERLVYKALSLGCKIIVQNEKYTTKTCTLCGHYNEWVTTEHTIDCKGCKKTYNRDNNGARNIFLKSLA

SEQ ID NO: 4915 - protein, 625 aa, Bodo saltans virus
MKKKPDKIYRIIKVPLDYVFRNIYSYEYKVLQENIIKCNKIFTYSLEFLKLYCLHSYEINNIFPTINSNLIRCILNIITTNPRVTTNEKKEITEFKIILMKIYNEHFKDEYIDINICSTGLKTLFEYMIIQILTIYENNIKLHYCDYVKRFINWFCNKKRFIEHYQKTKNKIGEKTFIANLKKIHYDVLNVNIDDNSYKTNVAFHDLVKIIKSIVLPKKSFIKSLYYDLECEPLKYLENMHIMMLIINNDNKCIYNVYPLRTSIIPKYMKLDTTTLINLLMETDKGHYLREGNLVKLADESWNKFFKLDNKVFKLKGYKFDHSILTDGVGCSIQFIKEEYYNKFVPNKKKITETYEYIDELEKEDYERLKEKQIVAIDPNKGDLIYCVDGIEKERNQFRYTQDQRRKELKIKKYKKIREKLKKEIIDGKTVEEWEAELSEKNRKELKFAEYKIYLKEKHKLNKKLEEFYEKRLFRKLNLNGYLNKKQSDQRMIKNFKEKFGESEKVVICIGDWSEREQMKNKEPTKGKGMRKTFEENGYELYLVNEYNTSCKCNVCEGECKIFCKGENPRPWKNNKIPIHGLLKCKTCKVLWNRDENSSCNIYKISKLAIEGKQRPFYLTNKMNK

SEQ ID NO: 4916 - protein, 644 aa, Bodo saltans virus
MQIDSDGCEENYLCIADYVTNSTINEQLSLKDYNNIFDFMTNISKNVYNTVIFFNDVYYKFKNRMFKNILHLFFIHNTQKITEENIQAQIYYQYDLFYKLYVSSKKNSYNNNKILYPYIKDYICKHNITLMNNNYNHYKNNIIKNIIKEFKFSYSDDNIKHIELISVVETILRSFYNKNWNNTLNEIKNKLPCTINNAEFINQIKKNDKLKNNNNYKEQFNEYAELYKIKGTSDRNIISRFVYKNLGNNKNYLPSNVITEIINKSFNGFILYFSNKEKGIKCSTPKYLKKNDKYSLVYSPQSFKIIGKYVRLTVGEHISKNLNSIVKNKYVLLNENEKTYYKMYVKKKHMKTIDKNTKVPITKNYIVNDNYIDKYDKNIIDGYYLNIRLPKKVHKKSIKNIEINSIQNGLKYKISYSYKHMATTKEEKEITEKNSISIDLGMVNLFSIYDPTGEAKIIKGNQLISLNKFYNKKIDKAHSIAKKANDKEITKKIQKMEINRKNKIDDYFDKIVAWIEKEYSHKENIIIGYNKGWKTNVNLGRKMNRKFYNIPYSRLLKKLKNKFGNRIKITEESYTSKCDALGLEEIKYHDEYLGKRVQRGLFSSSKNKLLNADINGAINIMRKKISLDEIKGEIQNPKVVRLFR

SEQ ID NO: 4917 - protein, 626 aa, Bodo saltans virus
MKKKPDKIYRIIKVPLNYVFRNIYSYEYKVLQENIIKCNKIFTYSLEFLKLYCLHFYEINNIFPTINSNLIRCILNIITTNPRVTINEKKEITEFKIILMKIYNEHFKDEYIDVNICSTGLKTLFEYMIIQILTIYENNIKLHYCDYVKRFINWFCNKKRFIEHYQKTKNKIGEKTFIANLKKIHYDVLNVNIDDNSYKTNIAFHDLVKIIKSIVLPKKSFIKSLYYDLECEPLKYLENMHIMMLIINNDNKCIYNVYPLRTSIIPKYMKLDTTTLINLLMETDKRHYLREGNLVKLADEIWNKFFKLDNKVFKLKGYKFDHSILTDGVGCSIQFIKEEYYNKFVPNKKKITETYEYIDELEKEDYKRLKEKQIVAIDPNKGDLIYCVDGIEKERNQFRYTQDQRRKELKIKKYKKIREKLKKEEIIDGKTVEEWEAELSEKNRKELKFAEYKIYLKEKHKLNKKLEEFYEKRLFRKLNLNGYLNKKQSDQRMIKNFKEKFGESEKVVICIGDWSEREQMKNKEPTKGKGMRKTFEENGYELYLVNEYNTSCKCNVCEGECKIFCKGENPRPWKNNKIPIHGLLKCKTCKVLWNRDENSSCNIYKISKLAIEGKQRPLYLTNKMDK

SEQ ID NO: 4918 - protein, 527 aa, unidentified
  source 1..527: note = Samba virus
MKEAVKTVKPKVPAKKRIVTGSKTKKKVFVKKKPPAKKPPDKKPLKKTTKKTVKKVINRPKSIHIPNKDLKIFKWIPTPKKEFTEIETNSWYEHRKFENPNKSPIQTYNKIVPVVPPESIKQQNLANKRKKTNRPIVFISSEKIRIYPTKEQQKILQTWFRLFACMYNSSIDYINSKKVVLESGRINVAATRKVCNKISVRKALKTIRDNLIKSTNPSIMTHIMDEAIGLACSNYKTCLTNYIEGQIKKFDIKPWSISKRRKIIVIEPGYFKGNSFCPTVFPKMKSSKPLIMIDKTVTLQYDSDTRKYILFVPRVTPKYSVNKEKNSCGIDPGLRDFLTVYSENETQSICPIEIVVNTTKNEYKKIDKINEIIKTKPNLNSKRKKKLNRGLRKYHRRVTNKMKDMHYKVSHELVNTFDKICIGKLNVKSILSKANTVLKSALKRKLATLSFYRFTQRLTHMGYKYGTEVVNVNEYLTTKTCSNCGKIKDLGASKIYECESCGMYADRDENAAKNILKVGLKPWYKQK

SEQ ID NO: 4919 - protein, 420 aa, Tupanvirus soda lake
MKKKKKEKWIPKLSDHYNEIETESWFDIREYQKNPNYHSSMVCFSDRIFIRAEKIILYPNKKQVNILQKWFNLSRKMYNKTTDFLNKKIFINKKISQINVKKYVNFRKLRSNYLKEAKESLCLNNINKHILDQSIARCVAMYKSSLTKIKKKQIKDFRVRKIKKDKRYKTLLIEGCLFSKVKNGFCISVLGEIPSNESLENISETCILSYDKYNSKYTLSVPKYIEPKEYETRNLICGIDPGVRTFLTVYSKEDVYQIGNDIDFNKYFYKIDRLNQICDSKESKQTRKYKRAIGKVYDKINNKVKDMHFKVAKFLCTRYKILKIGNLSTSKIVSNETSVLKESTKRLLYSLSHYKFREKLINQAEKYGVNIKIVSEYLTTKKCSKCEKKNEVGKNKIYKCGKCNLKVDRDINAAKNIRYV

SEQ ID NO: 4920 - protein, 779 aa, White spot syndrome virus
MSASLLTETSLEEEQRREVNNNTSKENDTMEKKTETAATTEKDPEPSVSKRSRNKEPKTTSTVYTSVKCYLSSIIKSESSRSNVTSTKERFEERCKSVSKMMVKGSLFLRLVVDECLRRYNHLEDEIDKWPDMTKDNFYVQLLRKGLDKKKLKEGSTHPVVEDVWNSPIVQETFLSQQGEGNNPIKRHLMDFNTITYAAKQLKTCFETNLRTHFRTRQQRAISGWLAENGFDKKYTKLVQHWIIGCTYKSDWVDSGDLERVKEGTKNFVTLHRKHLCVISDKKNGTISYSPEEKYPIPSILNYYKFLQTEYPQNKKIQKMIVVPKHKLKIHYCTFDQTTIQGICKDLGVWKDMEERHKQSEDILYKQGWYLLFDVKKIKKLRPNWNFHSIQTDGEGVSVLFSREVEEVETVSKKSKKNKKPRGDEDRRNYPPTNAKYVVGVDPGRTNVVSCSVFDTRQKRVVRKHRMTAKQYYQESWMTDRRKANETYKKNNKEYKEALEEITRYDNGEEIINDGNGDTSTPTKKFEAYLKVVNEHYRLLWNEKGKKKYRKNAMKVYSRKQKCISNFIDELIPKRDKIEDYHIAFGDAKFACTGRGEQYASPARIFAKKIKERVGGDKRFTFVDEKYTSKVCHRCNQPLNMLEKDCFSPNKKRKPPTIVTTTTTTTTEEDEENGKWKKATPLRENRDTRRCSSEKTQFGYSSNRKVSTGDISMETPVPSSTSSSFCTPTSITCVLGGKFVDRDFNASTNIVHKFLGFWDKKLMEKKDKMPLKYHFIRVA

SEQ ID NO: 4921 - protein, 464 aa, Faustovirus
MKFNIHKYYQSILNGDIESIFTKRNNEVKDPVCDYKFNNYTKLLSLTTHDEISGIKRNETVEDSVVYETKPLTSPTISVFGKLELDATGFTADDVQCARKIRIYPTETEKSKINKLFSISNAFYNLAIEGIENKTININNKTDIRRKCRVNDDVCNTVHVDAKMAYFDTRSLAAMMAVSNYKAMLTNHQNGNIKHFKLSNKHSTQIVYFSPKDAKLRDDHLCIRDMKLRIRNRDLPWLVEQGINQQISIKRYNRKYYVVVPFKRRSLDNHAKGICAIDPGNRTFATYYSPDEIGKLGVNLIEKVRKINVKIDHLNYIKDTVKLVSRTRHGLKQRIAKLSDKITRLVDYAGWKFAAYLTRRFRVIFVPRLANVVKGGRNSTVNRETRNLRHSEFINKLTHLGKINGCKVVETKEYYTTKTCCRCGIRNDDVGSSKVFSCVNAACKFTIDRDVNGAKNIWLRSLTN

SEQ ID NO: 4922 - protein, 499 aa, Faustovirus
MYKPRKRQIIHENTNNLMNIFLHYKYYYINIISMHLFNEEGNLKVNLQELRKICESEKFQRSETGFWNQNCSIIKDKLLATEFINHDKATDTIISRRIKFKPNYLQRKLLNDCFGAYRWIYNKAIDVIFEVKKYSDKFNCIIDIKLVKKAIYENVKINDDEIPDFIKILPSDSRKEALREAIKNYKTCLTHLNKKLCRRFLLKHKRKDATTFRIKTNAIKLTGNKLVIFKKRILDLIEAGNLNKDLRYATLNNGNLRRLKPYLNASGNPTAYPLINYSHGNYYIIVSGNRKVEQCNVKKEICAIDPGVVNFHTIYDGVVGYEGVKLYETRLEGINQRIDKITQHKQNFTGAKRKRMHLRELKLRAKVSNIVYQFRHTLASKLCNKYKVILLPKLGIKQVAKHLRRQVNRKLYALSHYKFNELIKQIATRTGTTVIHCLESYTSKTCGNCGNLQTCDVDRTFRCRACYYVADRDENACKNILIRSLNNYILSCSSSGKRK

SEQ ID NO: 4923 - protein, 466 aa, Faustovirus
MHLFNEGGNLKVNLQELRKICESEKFQRSETGFWNQNCSIIKDKLLATEFINHDKATDTIISRKIKFKPNYLQRKLLNDCFGAYRWIYNKAIDVIFEVKKYSDKFNCIIDLKLVKKAIYGNVKINDDEIPDFIKILPSDSRKEALREAIKNYKTCLTHLNKKLCRRFLLKHKRRDDTTFRIKTNAIKLTGNKLVIFKKRILDLIEAGGLSENLRYATLNNGNLHRLKPYLNASGNPTAYPLINYSHGNYYIIVSGNRKVEKCNVKKEICAIDPGVVNFHTIYDGVVGYEGVKLYETRLEGINRRIDKITQHKQNFTGAKRKRMQLRELKLRAKVSNIVYQFRHTLASKLCAKYKVILLPKLGIKQVAKHLRRQVNRKLYALSHYKFNELIKQIALRTGTTVIHCLESYTSKTCGNCGNLQTCDVDRTFRCKECHYIADRDENACKNILIRSLNNYILSCSSSGKRK

SEQ ID NO: 4924 - protein, 496 aa, Faustovirus
MIISCILCIFPIFNNRYYNYFLSFKFTRYIKYIMKFNIHRYYQSILNGDIESIFAKRKDEVNSPVCDYKFNNYAKLLSLTTHDEIKGIKRNESVEDSVIYETKTLTSPTVSVFGKIEVDATEFVAEDVQCARKIRIYPTEMEKSKINKLFSISNAFYNLAIEGIENKTININNKTDIRQKCRVNDDVCSTVHVDAKLAYFDTRSLAAMSAVSNYKAMLTNYQNGNIKHFKLSNKHSTQIVHFSDKNAKLKNGCLCIRDMKLRLRNRDLPWLVEHGINQQVSIKRYNHKYYVIVPFKRRSLDNNAKGICAIDPGNRTFATYYSPDEIGKLGVNLIEQVRKINAKIDHLRSVKDTVKLVSRTRYGLKQRIAKLSSKITRLVDYAGWKFAAYLTRRFRIVFIPRLANVVGKANSTVNRETRNLRHSEFINKLTHLGKVNGCKVVETKEYYTTKTCCRCGIRNDNVGSSKVFSCINVACKFTIDRDVNGAKNIWLRSLTN

SEQ ID NO: 4925 - protein, 468 aa, Faustovirus
MNINKNYGYLLGDLESIIDRRNFETNKENKTSSGEYIYDNRTRLLSYITPSETFDYQTNGLVGKYNIKAKDSITISALGKVEISNYELPSEYIQCARKLRIYPTESDKTKITKLFHISNAFYNAAIDGIVKKKIFSESSKKVIREECKVSNDVCETIHINAKDAYYDTRDLATLYAVANYKAMLTNKSNGNIKHFHLSNKHSMQVVHFSEKNARFKKGKLCIHDMKINLRRCDAEWLAEHRIKQQVIIKKSKSKYYLIVPFMRKNQDNGKKSICAIDPGNRTLATYYSPDEIGKLGDNILDLIKPIRNKIDHLKKLRNSDMVKSNTRYGMKQRIAKLNTKITNIIDYHQWKFANYLTKHFRLIFIPRLANCVSKQNGKFTRELRTKINRDTRSLCHSKFIDKLTHLGNVYGCKVVETKEYYTTMTCSNCGRVNRKVGGNKVFYCKGCKFTIDRDVNGAKNIWLRSLTN

SEQ ID NO: 4926 - protein, 463 aa, Faustovirus
MKFNIHKYYQSILNGDIESIFTKRKDEVNSPVCDYKFNNYAKLLSLTTHDEIKGIKRNETVEDSVIYETKTLTSPTVSVFGKIEVDATEFVAEDVQCARKIRIYPTETEKSKINKLFSISNAFYNLAIEGIENKTININNKTDIRQKCRVNDEVCSTVHVDAKMAYFDTRSLAAMLAVGNYKAMLTNQRNGNIKHFKLSNKHSTQIVHFSDKNAKLKNGCLCIRDMKLRLRNRDLPWLVENGINQQVSIKRYNRKYYFVVPFKRRSLDNKAKGICAIDPGNRTFATYYSPDEIGKLGVNLIERIRKINAKIDHLRSVKDTAKLVSRTRYGLKQRIAKLSSKITRLVDYAGWKFAAYLTRRFRIVFIPRLANIVGKANSTVNRETRNLRHSEFINKLTHLGKVNGCKVVETKEYYTTKTCCRCGTRNDNVGSSKVFSCVNVACKFTIDRDVNGAKNIWLRSLTN

SEQ ID NO: 4927 - protein, 463 aa, Faustovirus
MKFNIHKYYQSILNGDIESIFTKRKDEVNSPVCDYKFNNYAKLLSLTTHDEIKGIKRNETVEDSVIYETKTLTSPTVSVFGKIEVDATEFVAEDVQCARKIRIYPTETEKSKINKLFSISNAFYNLAIEGIENKTININNKTDIRQKCRVNDEVCSTVHVDAKMAYFDTRSLAAMLAVGNYKAMLTNQRNGNIKHFKLSNKHSTQIVHFSDKNAKLKNGCLCIRDMKLRLRNRDLPWLVENGINQQVSIKRYNRKYYFVVPFKRRSLDNKAKGICAIDPGNRTFATYYSPDEIGKLGVNLIERIRKINAKIDHLRSVKDTVKLVSRTRYGLKQRIAKLSSKITRLVDYAGWKFAAYLTRRFRIVFIPRLANVVGKANSTVNRETRNLRHSEFINKLTHLGKVNGCKVVETKEYYTTKTCCRCGTRNDNVGSSKVFSCVNVACKFTIDRDVNGAKNIWLRSLTN

SEQ ID NO: 4928 - protein, 482 aa, Faustovirus
MNIFLHYKYYYINIISMHLFNEEGNLKVNLQELRKICESEKFQRSETGFWNQNCSIIKDKLLATEFINHDKATDTIISRRIKFKPNYLQRKLLNDCFGAYRWIYNKAIDVIFEVKKYSDKFNCIIDIKLVKKAIYENVKINDDEIPDFIKILPSDSRKEALREAIKNYKTCLTHLNKKLCRRFLLKHKRKDATTFRIKTNAIKLTGNKLVIFKKRILDLIEAGNLNKDLRYATLNNGNLRRLKPYLNASGNPTAYPLINYSHGNYYIIVSGNRKVEQCNVKKEICAIDPGVVNFHTIYDGVVGYEGVKLYETRLEGINQRIDKITQHKQNFTGAKRKRMHLRELKLRAKVSNIVYQFRHTLASKLCNKYKVILLPKLGIKQVAKHLRRQVNRKLYALSHYKFNELIKQIATRTGTTVIHCLESYTSKTCGNCGNLQTCDVDRTFRCRACYYVADRDENACKNILIRSLNNYILSCSSSGKRK

SEQ ID NO: 4929 - protein, 693 aa, Tetraselmis virus 1
MSDSKANEPKKRQRGNVSRLQLDALLKDVEGEDTVPWWNHRLNFAASNGLISDLQLRRSLSYRNSCVKTSLRSIGVAKPLQDRFRLYSIACSKIQHRLGAVLNMAVVIHKDNEASLCRLASVCQDVQSLRDIMLDGPNPKPLEVVLAETRYPSLLRLGPSDEEISLMSSWDQAKTYIANRFVANVQVHVRSHLQRRIKKSLRSRINNTENDVAMKYVFSDGTAPEDSEDREHCERMKTRLYALKLLSRDGFTLPKREKVSPDMMLLHFDLCKEEIASFQPLPMATTLSRCHARICERVYGTLTKGMPNVPEFSSLVRERRKRVVPRRKWTKKAFRQVRRSQKAKKSGKRKQQIKKRRKQQKLKPDQQIDSLETDGYSVSLALKTPHKNPADNLSPEEKFEKHIARLKKVMTKPDAFVAGNDPGRKNLATQALLSVGSEVSSTQASRVQFTRSQWNSVIRSKQQRAWEEKRRNGPVKTALDALSSSGGKKSCNEDKWAAYLTASVENQRVLHQEFLENDERQRRRFLAYGRRQRAIDRVASRMVNTPDRKPLVIGYGNGSFPCHGRGGSDTSVPVKSLYRAVIAAFKKKRICGGVIKVWEYFTTAKCYRCHNRMEKMFKTVDGKKVEDRDFRCCATCTHEEHPKLRNRDWNAALNILVLTIAILKGEDRPEYLKPEKKKRRSAKRKADGSSIAH

SEQ ID NO: 4930 - protein, 587 aa, Tetraselmis virus 1
MPKRVRPPDKEEKTICMGLKKHLLEPSLLPVIETMVDNVSRRTHRASLLANHFFLKHIQHPGFDELAKAVTDQMFFYTALSLGKGKKYENLIEFFSANDSLYESIPALPLGGGRVMNSAARQMKTNVGNYLWMTFDARIKRFCSKSDKHAQAFVLARTRNWTPYREVVLNKNESQLLDLFSNILSTSENVTDSWILENPGPVLRLYHRIQRMCEEKQKEAKEKKQKGAKGFSMLPIFKMKSHFITIDATLLRELLVHGGLLNKNADGSAFEKLEDDHFRSVFKLRGSWLLGNEIKTDGFSLRVNIWRNASETPQRQRKRAFGQLEIENPSTENLLPGDYHDYFSNDPGQANQAFVHHTIDHKVVRKARLTYKQFCVESHHSANLKKQKRWLQEIQDENTELSLYPVRTSDVEIFKGYLSTKVPMYERLWKHHMHPRAARARWDYQIHSRSCIDRFWSGLAYNRPAGMPLHQRPLLKYGSANWGTGGAPNKRMLASAKKYFRVVLVPEFNTTACCADCGSRLKAVTQAFIGPLEEGKNRYPRTNRGLKHCSSNVCRSNPLKSRDGNAATNIGYAFPDRPEYLCPKITQ

SEQ ID NO: 4931 - protein, 640 aa, Emiliania huxleyi virus 99B1
MDDSHPCLIDMLNQQQSNNIMESTAEPLINGQEMEQLNTCDQHQTDNGYMGSSMETQVMDMFPSSMDESLPESNSITSDDSSMSSNRSTQDALPSPIVLPDLTTTAPVLNRFYDSRLKDVYNMFIYPTETDSVGSATISSSTYSTTMEQQLKLTNKMNSLPQTNRPSLQTTSFLSSQFSVLGCTEREVEAAVDAQVGEKRKKIPFQRQTELQGNLRTYKIKMFPTPEQKDELKRTFGMARYAYNWAIAQMKEGKKPNNIQLRNEFRKLPLPQWASEKKKQVATRITAGAIKQAVDAVLTNLKKKKKDPSHHFEMTFRSKFANSEVVNIEKAANGGSLAKMQAYTSEHLPYRAGRKNALLYFGNNLKQAGPILIEDNPNVIDMFVAEGKPKEDGKILYDRRRNTYYYIYLYEQPALRDPDPGFSDKDIVCTDPGEVVFQTFYSPSGSHGELLLDFRQVLLERCKKLDILHSRVTKKEKMRRQGLLQGRKNYLIIRRLKQAWARERARLSAFVERAHYFAANYILKNYDIIIQPQMAVSKMVSDLNSKVARSMLTMSHYMYNRRLEWASTRYAGRYIVHANEPGTSKTCTNCGYWHADLGTSRTFKCPSCGIAVSRDLAGARNNCLHAVGTVIRNRQLSEKR

SEQ ID NO: 4932 - protein, 625 aa, Phaeocystis globosa virus
MKKKKKGEFQEFRNNEKSAYKTFKIPIKSILYNYDTTQPVINNLVFEINDLMIHAYQFIRLYVLSCYTNKQTLPIIDDIFILYCIKTLGTRDNRGKKCKDTALLDTLEKFYLEEYQPLLNHEKTNLKNTTFLLPYLATQIHTSLSNNAQEHFIQHFLRFINTTTTAITEDKSILFKLKHQLMSLDNETNEMFNEWKITHLHNIFPQNIKKSIHYDVKVRPFEYLKGMLYMNEVLEKEEHKLFQPLPLRTNIIPKHIILDTASLVSLFCPETDKDGNKNKKGNLLSNIKDNQYDIWNSFLNLNHKIFRNQHYQFHHQIQTDGISCCLLFIRKDLKDKKWGSRVPSIPEQDFYNIEDLSKEQLDTLKDRNIVGCDPGKRSLVYMMDKNGNKLQYTAPQRKRESKAKTNQRILLEEKKRHKIIEKETELSLQNSKSVDYIKFKTYLVEKHKLNKETTEFYKKETWRKMNFRQYSYGKKSIDTFLNKIQETFGSNILIGYGNWSRSTQMKHFMPTMNKGLRKQIHKKYDTITINECNTSKKCCDCNKDLEYYKDKENKKVFRLLVCSNCVSCENKKIVFRTRDANSSINIMKLTSCWIDSQTRPTAFHSHISSFTCSTIKEEQEKVRPS

SEQ ID NO: 4933 - protein, 650 aa, Emiliania huxleyi virus 84
MPRNKKDDARVIKCPLDKILKPEIVSIIRDIVPVYNRIAISATLFLNLRIRQLVESRASSTEFAQFFQANKLVKYFMAVTSSTLGAGDLHAAFGTNFPSVIREDRPKAFSQVCMYICRNLEATATTNVWYHMKKRVCTVVKKTFGIPRDEWLHMSNEEKKNHKIHLKQVNVDVLSLEGDAFVSPEQYHDWISNLRSEMKVTHVTRQLLADTRGVDVDDPNVPGMVYYMKVKPYEFIYAIATLSSHLNSITGGGYALYPIRSSMVPKYLHLDELILADISPGISKGATNTAAGKKRTADGSELSNKDKLVARRMIVFKHVMTPKAFNKWENHLGWSVDTDGYGCSLHVKKKVNELPPSTHPSIHNGLIKIDAFKDKFSERYSINDLSIIGVDPGKREIVSAVDSMDYTSKYTFRKTHQDHLTGTVRHRKAMECTKPQSVFETEQDLATTSKKVVPVERFMDYATKLATSISSSSGFYEQGVYRKRKWKRHLRLQKAYSGIVNNLKMVSCHPNKPIVLAYGSWGMTTSGLPFKGLPPTIGIGMVRYLARFFPVVITPEYYTSTICPCCDSNVTRCTHVEQQRASPYFENGRLKDIRGLKHCPGCNTYFNRDNMGAWNIARNFTNMYQGMAPIRVRNAAQAAEQELTNRTEVD

SEQ ID NO: 4934 - protein, 768 aa, Dasosvirus sp.
MTKTDTLKKVKKKDEIIQNNDVPFRRKKELPDFRTMKTSLKSILKDEQVNKPIILDAVNRTHHVVIHVYQFIRLYILDKYHKNKPLPIINRDFIAMVFKALVKTSIAGNTPKGKNLQLLKEFNSFYEKTYRQLGYEEKIDGVNLSNIFSNMEVDILTNIKNNIQLHFFSYVNRFVNSSFRDENNRIIENTKKKDKVELRKKLKKELYRVKEDLKKNTLLSQKKYHKWIKKHRVNMFPKEYTDSYEFDIKHNPFNYMNCMIYMCLVLEENEAKSFQFFPLRTSICPKYIPIDTTILIDLFIKNNKREYLNNVSGCKEELWNRLFNVDNSIFKQKHYSFDHRILTDGLAISIQFRNNSKIEKNKQNNRNRVKASKNAKAVYKHMTQKQIDITKQKKEEKKKEEQMKKQLEIKKERERKKEENKKLPKEKQKKIIEQKKKEMERKKQEMPIDFPYLEELNPTEYEELKNSNWIVNDPGKRVLLYMKNKDGERLRYTNKRHVTKTKRLKYQTIIKNYKEKEGINDTEKKLTGCNSKSCNYDKFKEYILEKNEANKELLGKYEAEIFRKYKWFGYINRKRAETDLVREIKEKFGEDTIILYGDWSIGIQKRYMMSTPNISLKRKLKEHFTIYNIDEFRTSILHHKTGKRCENLHLYDKNKKGVREMHAILTYKMENNRIGCINRDENATNNMLTIAKEYIKKKERPERFRRGTELIDEEEITRSSKSKKQNSKQAPKKAPKKAPKKAPKKAPKKAPKQTPKPKQYQQKTRTSN

SEQ ID NO: 4935 - protein, 572 aa, Edafosvirus sp.
MLKVPLFPDKKQKLLLQLWFDDFTIIWNTTNSLLSKSLINKHPDDNNFNPSLYFDFDPADPNSFLSIKNNIIDQINKRKIRVKFKKNLLKLFQTKWTNIRLANKNKKYTKKNFSDMKIEKEQIINTYHEKFKDDMIHLNDENTEKYLNFISLRDNHLKKIKKEICLKNKIPDHVLAEAIDHNRSKYQSAISNFTEGNIDHFRIRPWKLNRRRRILIFEKDFFKGIIKEKTTYNDDENDSQTMKGIKDIIQELFKKYKPYKQKIVNKKDHNKLIMNIFDTIKEEYTNKEIEDTIRNKKLKKKSFAKTLKTFINREIKRIRKEQMNYYVRLCPKTLGNIRCSPMINEIESVDKTSTIIYDKIKKSYMLLIPVKKKIKEFLIKEEMLERTSKKCGADGGVTTFVTVYGEDQVSQLGKNPGNILKKYYRKIDYLNEKRCKMKGKKYDRKMIKAQDSIKNKIADMHWKIAREMCQEYDTIVLGKLSTINIVSKENDLPKIVKRILISLSHGNFRKILTLQGKKYGSEIRIVSEWKTTITCHRCKEENEVGKSRIYICEGCNLEIGRDINASINFYVK

SEQ ID NO: 4936 - protein, 726 aa, Edafosvirus sp.
MYVYTKTRFKNILRPDINYTELFSAIHRMHLITTYTYQFLKAFVIDCFDKNSDMPDITENFLRLIIKVICIKAPRSRALTEDNKKIFDQLQNFYDSKLNNTNMIPVDGLHLDNIVGYTITEMLTSIKNNIVANFSLKVKSYVTLTYKDEIKDEINKLKKKKVPQSHIKEKYKELTNEINLIKNDLLNNNEILLSNKKYHKWIKQERNKLFPELIQDSNDASKTHTYNVHVKPLEYLKHYVYLAKKMEEFNNEVSNTCKSFNFLPLRRSFVEKSIVIDTSSIIKLIKLDDTKLDDTKQSYLENICEKEDEIWSTVFKMKGKKYRRKGYTFNNYIVTNGYDVSIRFINNNNMKAEKNRKLKMTIGRRKAFQEKKKCKEMGTKYVTISEKLSVTEKKPKIRKTQKKEIEEKKYVDGIPYIEDASESEREELKKRKLLYIDPGKIRLLTMIDNEGKTMKYTCGQRLRETKRYKYREKLNKYAEKEGIKEKEKKLSEYNSKTSEYKKYIEYITEKNKIMNEVGDKYNKEEGIYKKYKWYGYINRQRSEARIVNKIKEEYGEDIIIIMGDWSENTQKKRIKRISVPGASLRRLLKENFRMYMINEYNTSKLNYKTEEETKNLIISKERRVPKYNKKKMEEVKVHNERLNEEDRELKRIHSVLTYKMENNRMGCINRDINSVKNMRKITKHILERGERPEKYKIDYHPKTKEKKTKVKPKSEKQKSVKGSHAK

SEQ ID NO: 4937 - protein, 514 aa, Edafosvirus sp.
MKKKYNKFIFDRQLADQFWLPIDDNFYATLNIPTDSWFDLSKTNTNSPTVIQFNKNKQKDIFVTRTQKIKVFPTPYQKNILLDWITAYRYMYNATITYTRKHEINDDKERVKLYNFNKLRKIVNDIVKNNKQMYDWIKIIKIPQHTLDNAINDVCKAFKSALTNKQKGNIKDFKLRYKKESTVKQTILLEASCFQNNKFKVDALFYIRHLYGEPYKAYRENKNTFSASVMGDYIQTSESIKDVNTTSRLTYNKNTNEFMLFVPYEKSTENIENREKMISLDSGKRTFQTGYGMNEVLDIGHTCIKKLDEMVSEIKTIKETIKKISDDPTYKLKIKKTKKKKFKKTKKKKAEEKSPKKKRKVPIIKKYKKQLYQKQRKLTNRVDDLHFKTCNYLCNNYDIIVIGRMNVQSIVSKKNKTISQETKESLLALRQYEFRTRLESKCEERGVKYYDTDEADTTRTCGCCGGINNKVGGAEIYECRKCKMKIGRDYNGARNILLKIYETIKKDHKIEIIQ

SEQ ID NO: 4938 - protein, 505 aa, Edafosvirus sp.
MVHLKFNKKKKKKKPFNPYHHPEYKKLSTSHALFSPSLWNPHDLPLSSVANDTDSWFDFVEYTDNFSVPIQDFSLFKNNSHDLYKHFFRNKFKNIHTRNKNYKTIIIPLSLTFFQQKIMLHWMYCCILMYNATVECIRKIKFNTGEYMYAFRTLRDKHLKHIKKYITSISRVEVDGIIYYIHAHTLNMTIKEVCNAYKGCMETYKYYILDKNGKYIKKIKPFRIKYRNFNNPLKYIAFEARTIAPDKMSFFASVFGPIIERRDGLDFRDIKREFLIQYNTKTNEFTMLSPQIIPPQKKENNEPMKYISLDAGLNVFLTGITNDKVVELGSNLIKVIMELLKKIDKIEKDNKPNKKRRKRRLEKKIKNLIEDMHWKIINYLVKNYKIIFLGELKIKNIISNTKELPEILKRITTTMSFYKFRERLKYKCKVNNVELHMVNEMYTSKTCGKCCKINEVEGRKYECKHIEGIKIKKYVVGRDINGAYCILLKGIYDTQISCIMGEKIK

SEQ ID NO: 4939 - protein, 573 aa, Edafosvirus sp.
MYYSMNKIRKKKKKKFYNNDDFEKEKLSLHDQVLLHHDKLLLPSYFVRLKSIKTDSCFDLLSYTQTDNNLICNDVQFNITPPEFKPLIRTIKIDMLLNQSQQLIFHTWFDATMLMYNKTIEYIKKNFNIESLHEIKRINKLCYALNDKLTHLYKDVSNLIKNKKKLLTKLKNKYNKKKKTSIDLITINILMKDIIDHKNKITCLNILIHNLNSDYNKYNLRRNKLDKHIDHIFDHTHTRTYVLKSTTEDILLNSQTKLFNYDTKIKTHMLNAAVKQASAAFKSAKENFLNGHNKKFRVRYWRPNRINKIIEIGAEYILEIEKDSEEYNLCPHIFGPIKYRYDGEEYKLEKKTVKIHYEGSTGRFRLLVPEDLEAKKRCKNGKYIGIDAGIRTPFTGISNNELIKIGKKLVEMIRMRLIMMDNIMNNPDIPERSKYNKIEKYTRIIKDRVVEMHWKVINYLTENYDIIIIGKLEMSKILRSKKIDKMTKRIGSALNHYKFLERLIYKAKTKGVEVEVVNESFTTKTCSNCGHYKEELEGEEVYNCDEYGCLKKIDRDVNGSRNIMIKRIKKEEI

SEQ ID NO: 4940 - protein, 876 aa, Gaeavirus sp.
MPKRRKFKKRKDIDVAKLTGFDFIKTNKDNIINVIINKAHLITINEFVARVNKIVINAYQYIKLYLIHLFDNNKTFPKLDEAFIGDVFRILSSKQLSVKTSLKLKDLISFYDDYFAPLIDKNDIQSYKYMRYTLQYEAIDMKKNIYVNIQEHFIEHLNYYIYIMLDVKTKRNKITSDNKDKEIRKVLHTELTHDINNVLTDLTNFEEPISKPEYHKFIKNERKNIYGNKTQFTGDTVFYEIKCDDKQHDYLRPLFYIHRKLEEKYNEIHEQNKFIEETNLIIKEYNDIAFSQIMKDNNELIEIIEYKSKFIDTFKECAKALNNSWTNTRKVQNTNFMNLRNKNSKLFDVIKINKATIKTNLEIIKFNKQFGETIDDRLVDMIVKCQKQNYNMMQTIRHDRNIVKMTNLTISQDNTEINYHTKNNKRTMKKYEKLNFENKLIIHNLKTREALKTFPKIKQIKLFNVVPLRTSIISKHITIDTQGLIWMFYSGDHVVEYIEDCKDDKDETLKLWGEIFNLDKKVFKNKKQNKKIVYQFHHMIRTDGVSISVLFERLNPDGSVHKQEKSKIYGIVAHTPYIEKTLITTDLKTRKIVCIDPNMQDIIYCGSKNKNNKLETFRYTQNQRRLEIGTKKYSKIMDEINKKPTIVSKTLTNETIKSTVKEIETELSKFNSRTTNMTEFKKYIKAKNIANSKLFSHYSQTLFRKFKLNRFINTQKSEAKLVSKFGNKFGKPNVKSIIKKVDTSPIIVMGDYDNGTNNLKGCEPVICKKIRRILKNAGYEVYMINEFRTSVICNRCHEKLDKFLKRKSSKPNSRMEEILVHGLLRHTDEKPEGEQEAPICKIIHNRDKNAVQNMIYIVKEIMRTGIRPAPFRRDNT

SEQ ID NO: 4941 - protein, 798 aa, Gaeavirus sp.
MKRPPDIYVTSKCSLTSIIRNKSNIDVLLDAANRTNQLVIHAYQFLRLWILDKYHHNKNIDLIDHDLISMAFKALSIDSNGPKPKDDNLRLYNEFKTFFDDVYSKLECKLKNNSKNLSKILQYSATEMITSIENNIKNNFVKYVKKFVNSSYSNQIIEITVKLEGKTKTKKKKELFTELSLVKDDLLCNTLKSDKKYHQWILTNRPKLIPPRASKIIDDDIQINPQGYIKSMIFMCLEIENITIVNPPAKKINTVTKVNSTTKNNFIAFNETKAKCKSKTFINVSSMIKDNGYLRRINRRFKRTMLKQRQMQAKFINPSNNIKKKVKKSNTNDNNHKVKSFQFFPLRTSSIVKYIKLDTSAIIDLLVKGTKEECLKNIKGNKHALWNTFFNLDNPIFTQNTYKFDHKISTDCKTVSIQLIHKDHIKSKEIKQDKIVAGRATVQLKKKAMTPEQLTLYKANQKIKNIENKMKLKTDAVDKAQTAKDEYNKLQPDEKLKVRKELQKKSHEEFPYLTELTDIQLTDLKKNDWVVCDPGRRTLFYMKSKDGTKTFRYTNKTHVQRTKRLKYQTLIKNHKNKLGITKIEEELSKFNSKTCKLVEFKNYIQNKNKANVELFKIYKSDYVNKTSGDKFRKYKWYSYINQKRTVAKLNRKIKQKFGKDNIIVMGDWSASSNSSIKYISTPNIGLKRSIAKSRTIYSIDEFRTSCLNYLPAAEKSKKLYLPDKNQVLRKLYPVLTYKTESKTLGCINRDENAVRNMINITSRHIEKQALNKRYCRSYDLKKDSNQSMVKCCHVVRCN

SEQ ID NO: 4942 - protein, 686 aa, Harvfovirus sp.
MPKNNDNEHITMKYPYDSIKISPASDSILNYAVDRVDSIVKQLDFFLRSYLLYQYEHDEELITINKYTIETAIKCLTQRPIAGPPTKNVNKVALEHKFIEFYNKHFAEYILSFSQYHTVENVDQLEAFKIDKTNLTQILSYTVTNIMTNINSNIKFHFFDYLRRFVNQSFKASNEIILSQYKGKAKIQQQKILTAEIFLVKNDLINYTITSDPKYHNWLNYYRPKILPTQYNISLEHDIDSTPQKYLKYMITMNKLLEEETLKGFQFFPLRTSIVPSFIPLDSTSLVELFIPADKKKYLFNIIKYKDEIWSKVFQLNHKVFKLKGYQFDYNIMTDGYTVCLKFIKNEYVDDKRKAQANKNQAGKDTKQRNKDLSPIQIDQLKKKKEELQQQIKDEKKLARIEKKKEFDNLPKHEQTKIIAQIKQKLEFLYFDKLSKKQTQHLGTAKKIYADPGKRSILYMMDDEGNYLNYTNAMRMKGTKRLKYQKLRENFKKRENVNMIENQLSSFNSKTCNYLWFMCYIEMKMEIDRHLKKFYSNELFRKLKWFSYINTKREDARLLNLIEKKYGKDITIIIGDWSEFGKVKYMSTPGIGLRRKLAKRFKVYMIDEFRTSCLHHKTEQRCENLHIELNSKVRKIHSVLTYQMQNKRVGCINRDRNAVQNMRKIVHHYLATGERLERYSRSYKIN

SEQ ID NO: 4943 - protein, 685 aa, Harvfovirus sp.
MAKNNDDEYITMKYPYDLIKLSPGSDSILNSAVDRVDSIVKQLDFFLRSYLLYQYERNEQLITINKYTIEAAIKCLTQKAKAGPPTKNVNKVGLEHKFREFYNKHFAEYILSFPQYHTIENVHELEAFKIDKTNLTQILSYTVTNIMTNINSNVKLHFFDYIRRFVNQSFKASHDIILSQYKGKAKIQQRKILTAQIFPVKNDLINNTMTSDPKYHNWLNYYRAKILPAQYNISLEHDIDSNPQKYLRYMIIMNKLLEEETLKGFQFFPLRTSIVPNFIPLDSTALVELFIPDKKKYLSNIINYKDEIWSKVFKMDHKVFNLKGYQFDYNIMTDGYTVCLRFIKNEYVEGKRKAQANKNQAAKDTKQKNKDLSPSEIDESKKKKEEQSQQIKDKRKLARIQKKKEFDNLPKEEKAKILGQMKQKLEFLYFDKLSKKQTQRLGTAKKIYADPGKRSILYMMDDEGNYLNYTNAMRMKGTKRLKYQKLRENFKKRENVNTIENQLSSFNSKTCSYQKFMCYIEMKMEIDRQLKKFYSNELFRKLKWFGYINTKREDARLLNLIEKKYGKDITIIIGDWKEFGKVKYMSTPGIGLRRKLAKRFKVYLIDEFRTSCLNYKTEQRCENLYIELNSKVRKIHSVLTYQMQNKRLGCINRDRNAVQNMRKIVHHYLATGKRLERYSRSYKIN

SEQ ID NO: 4944 - protein, 906 aa, Hyperionvirus sp.
MKDDNLSETPNENDNNKKNNIKEIDDEFSYTYEIEAATSIKCSLLSVLNSNSKTRKKKMAIYIQGLIEDYNKISLDGIYLFNILIRTLIKKRLYSKINSVTIRRCFGILKEGDKYITLKDPPNPSEIDMIYEIIESYFKNNNYLRPEFNHDEEGFMKPLEACADGYLNNLILHIRTNFFRFQRKYLKSKIESEFENHKLSRSEINILTLVIQKKLVNLEYSPRTDKNIKKLQCLLGKIPNLNVFTDNEKKLLKEFIEDLELLETEEKMIKKISSDNIIRFLSYFSLMLEYLKSIEKERFSLIPIFQPKMRFFRFDPMTLCTLYNKWESINGYNPKLPAAYFKDNFDNYFDVMFNISDRFHKILNKFPTIKSIQTDGIAVVLTFEKRKEIKYLTDKDKREENRIKRETEQKKIKKEFLEKMKGLRTKISSLKKDIGEGKKIIGKYIYLEFDCICIKNQIIEMSEQIKNSDNDTVREKILRDLKKMSDKYQNIQKSLDDCDKDMFLKFKLELKRKQNNLDTLEKELESLRKKPEIIDLEKKLNPKRQDIGMYESTEVRCSPEFLKEYRLVGADPGNNPMVDMACEDGIHVTISKNEYFDLAQVFNNNNKINKLREEANMNDITTQLSKTTYRTASTEEFMEYVKVIKKNWNEIWDHYSDYKLSKIKLSSYRSSQKAISGMARRIIERLNDEKNINKYMKSKEMKLDKSILEKPIIIFFGKGNGSLTISNTKNTSSKGPIKRLIEALSKYVVVILTPEYNTSKMCHLCGEKLIDIETYNFPKRKSLERNMLKRMKDNKENKTAKEIEKSEIDDNIKKIKEIERLRGIIHKLKKIRKEKKNRVKIEEIEREIEGMKCGRRNCYQTSYKLRRCAKHHEENLCKLFERNLNAAINIRKKGIKIITTGICDEA

SEQ ID NO: 4945 - protein, 738 aa, Hyperionvirus sp.
MPKIDPPDKYTTIKVRLNQISQNSDCLKNIAEAVKNMNILIRHVLFFINAYLLYLYKNNKEFPIIDKPYIRLIFRLFCIKPKRGAAMTKENQILFKAMQKFYEDHFILTNPHHLIDGQSLSYMIGYATTTILTNIENNISMHFINRVRFFVNQNFVDFIPQEIDKMTGATKSELVEKRKELHKKIEQVKKDLIDNNETLVSDPQFHQWIKEIRSKIFPVNYSESYAYDVTVDPQKYLKCMMNMNSELERKELKTFQCLPLRRSPIEKSVTIDTKSVIDLLCENGTKKFYHDNMMENQQSLWDLFFRTKSKLFKRKKYVFDYTITTNGYVASIRFLNKKYLEQNNNTKTKKRVGRTNTAKARRERRISMEDQKDACITVNSLITDYLETDDTDNKTYMNLDISDTTKIVNYLLSEKINNKKVSSQKPTEIKVKQIKGEKKIKEVDPRYEFKYIQDLTGTELEYVKKAKKVYIDPGKIRIITAIDDDDEVYKYTCGQRLMETKRLEYQNKREKFKDYHYITENEERLNKHNAKTCNFEKFMEYVKDRNELDYIQDGEDLDLGLYEVYNNNRIFKKLEWYNVINTKRSEAKMINDLMSKYGKDAVIIIGDWSSNMPIKRISTPGIGLRRLLARHFKVYLMDEYRTSKLNHKTEEENSNLELPDKKRKIRKIHSVLTYKMSNGRMGCINRDINAVKNIRKIVKSILETGERPEKFKRKREEPISVKSFQVVVCEGTNNQIAQ

SEQ ID NO: 4946 - protein, 689 aa, Hyperionvirus sp.
MVLKKSEGQYITQKYLLSRITKTRDHDDIFERTVRTIDTIIKYVCFFLRSYLLYQFKNDEELIHIDRGVLDIVIQCITKKATGGPQSTKQAILRQTLKDFYNNHFAELTLNFAQYHSIEDISDYEFFKIDKKNLSQILNYSQTEIITNIENNIKLHFLDHLRRFVNQTFKEQNNQILDKLKTKKQKMDCRKRLTAELTKVKNDLINYTLLSEQRYHPWINTYRNIILPNNIDKTLEDDINATPQKYLKYMIRICRLLEYEGKKTFQFFPIRTSLIPKNITLDTASLVDIFFQENKKEYFDNISHYKEELWGEIFNLQDPIFHRKNAVFDYSIMTDGYSVSIRFLKKQYIEANKKKKDNKQNAGKKSKELYKDLSEEEIQKIKNDKSIKDKQKKADQSKAARERKKEFKHMSKEQQCKILENAMEFIYIHQLAKKKRRELRTAKKVYADPGKRSLLYMIDDEDNTLNYTNATRVRGTKRLIFQERIEKLKIKENINEIENQLCKYNSKTTNFEWFKCYIEKKIEIDEALRNFYHQEVFRKLKWYAYINKKREEANMLNMIEKKYGKDIIIIIGDWNDSGRINYMSTPGVGLRRKLAERFEVYLIDEFRTSCLHNETEERCSNLYLEHNNKVRKLHSVLTYRMNNKRLGCINRDKNAVLNMRKIVHHFLETGERLERYRRGINIKEKPTPK

SEQ ID NO: 4947 - protein, 681 aa, Hyperionvirus sp.
MVLKKSEGQYITQKYLLFRITKILHHNIFQKTVRTIDTIVKYVCFFLRAYLLYQFKNDEELIHIDRGVLDIVIHCITKKSIAGPPSKKQAILRQTLMDFYNNHFAELTLNFAQYHSIEDISDYEFFKIDKKNLSQILNYSQTEIITNIENNIKLHFLDHLRHFVNQTFKEQNNQILDKLKTKRQKTDCRKRLTAELTKVKNDLINCTLLSEQKYHLWINTYRNILLPNQTDKTLEDDINATPQKYLKSMIKICRLLEYEGKKTFQFFPIRTSLIPKNITLDTASLVDIFFQENKNEYLDNISLYKEEIWGKIFNMQDPIFHRKNAVFDYSIMTDGYSVSIRFLKKQYIEANKKKKDNKQNAGKKSKELYKDLSEEEIQKIKNEKSIKDKQKKAALSKAAREKKKEFKHMSKEQQCKILENAMEFIYIHQLAKKKRRELRTAKKVYADTGKRSLLYMIDDEGNTLNYTNATRVRGTKRLIFQERIEKLKNKEKINEIENQLCKYNSKTTNFEWFKCYIEKKIEIDEELRNFYHQEVFRKLKWYAYINKKREEANMLNMIEKKYGKDIIIIIGDWNDSGGINYMSTPGVGLRRKLAERFKVYLIDEFRTSCLHNKTEERCSNLYLEHNNKVRKLHSVLTYRMNNKRLGCINRDKNAVLNMRKIVHHFLETGERLERYRRGINI

SEQ ID NO: 4948 - protein, 777 aa, Hyperionvirus sp.
MDEVDKIKEDNPEKIKYETKLDGITSVVCKLNSVLNGDIYLKEIIYQKVIKSNKIILEGIHLFTIYVLYIISQDEHMPITETTIRRCMRYCLTNPNSSRSTGDIDEDDIIQHVKKIYFDFDIIGREDDFFDDSQGLMKGIEATADTYHTNLIMHIRTNFKRFQKRYLRHRLTKFLENYKDVENDAITFLLPALQQMINGNHKYSYRTEERRVRFNTLVIKYDLDSFGLIETLLLKEFIPFSINFADELPKVTDKEIYNYLSYFSYILKEFKEHDLKRFKLVPHFVPKIRYITFDARPLCAIYNSWKQTDINVKIFEKDYEKYFNEMFHIKKKYKKLLKKYPSVRSISTNGYTVSLRFQKITKKISVPKQPQPQKKEIECSPIIPKIKDLKTEYIKRMEINKEKHHHNDKTYRIPMSFDVKEYKADQSFLDNFDLGGGDPGNDFMLDISMKNGIHLNIHKNYYNNIAHIIRNKMLMDREIFKSEMNHIYSELALENIKTTDIRDYMSYVKVIRKNWNKIWEFSTKPQIFSLKFDSYIYKSKAISRIAKEIVGGLKDDKNIKDRHANYFDPIMFEENKEKVIMLSIGTGNGSGTISNTKGSGPKGPVKRLIKELAKYCVVVEVPEYNTSQLCSECDEFTTDVYGYKIPSENGRKKKDQNKMEKEVEKKEIGITIKATHRGRRTKEMLRDALGENGIKLDKKKIDRLKKDIKEYDKMAKKYNYYGKLYRLRRCAAKHYHNDRCILWERNKNASMNMIKMLENLLLRGTMGHFMKKRKKSG

SEQ ID NO: 4949 - protein, 644 aa, Satyrvirus sp.
MSNKRNKKISNYDLFIDNRRKCPVKDPIYVSNSEYNLTDWMPPINKETINLYTDSWFDIKYYRNPTPSITNFNPYSLLCQDIDLLLEQNKLPYSTPQKIVKYPIIPEESRAQQKKSIKWKKLKKEPVFLSTRKILLNPSMELKKLYHSWFDAFTKMYNVVINHVRKIIFVNGKLDLKLAYETIKFKDLRDKLLNQKNQIKSETSPQIYTHILDEAISLAVSNYQSCLTNLRNKNIRKFRVRELQSTRRRKIFKIESAFFSNKKFCELVFPMLEKQLLESIKHTCILQYDSFTGKYLLLVPYGEKEKSKETEKNDLDCGIDLGIRTFATVYSKYDTMSIANNISEFPNIKKNMRKIDKIQELLKYNREKNKKNKIEKNKKKNKKKEIEKNEKKEIEKNKKKEIKKIKKKEINKNNTNEIKNDKEIKNDKNKENDKGDIDIDMLVKEKKTSSLKKALRKYQRRIIDIIRDMHFKAAYALVQRYGKIFVGKMSTSTMVRGNSVLSKLNKRMVSILSPYLFTQRLCYMCHKYGTEFAKVNEYLTTKTCSNCGFVNEVGIRKIYICGGCGKVIERDENAAKNHLKIGYKNERNKGKSISKTIIKKNPQKKTNTKTIKKKNDLNKKEIEEHVYKGKVQKTKINGKEIYII

SEQ ID NO: 4950 - protein, 665 aa, Satyrvirus sp.
MHTNKRKKKTLSYDLFIDNRRKCPIKDPIYVPNSEYNLTDWLPPPINKKMIDLPTDSWFDIKYYRNPYPSVTNFNPYSLLNQDIDTLLEENKLPYNTPQKLVQYPIIPKESRDQQEKRIKLKKLNKEPVFLSTRKILLNPSMELKKLYHEWFDAFTKMYNVVVNYVRKIIFVNGKLDLALAYKTTNFNDLRKKLRSQRDKIKSQTSTPIYTHLLDEAISLVSANYKSCLTNLTRKNIRKFRVRELPSSRRRKILKIESAFFSNKTFCELVFPMLDSKLLESIKHTCILQYDSFTGKYLFLIPYSEKEKSKEIERNDLDCGIDLGIRTFATVYSKDDTMSIVNNISEFPNIKKNMKKIDKIQELLKYNREKNKKKEIEKNKKKEIEKNKKKEIEKNKKKEIKKNKKKEINKNNTNEIKNDKNKKIEKNKKIEKNKKKEIKNDKNKEIEKDKNKEIKNDDIITEIIKEKKTSSLKKALRKYQRRIIDIIKDMHFKVAYALVQRYGKIFVGKMSTSTMVRGNSVLSKLNKRMISILSPYSFTQRLCYMCHKYGTEFAKVREYLTTKTCSHCGFVNEVGARKIYICGGCGRTMGRDENAAKNHLKLGYKNERNKEKVEQKIISKTVTKKNPQKKTTSKKVIRNKKEIEEHVYKGKIQKTKINGKEIYII

SEQ ID NO: 4951 - protein, 670 aa, Sylvanvirus sp.
MTSIQTKKRKNEDGETTTRPDVALRYARRKEFSNTCIYLKWSKMCKDPLVRKHMPDLLINVNKLTLFLYPFLNYYASRLGQLDPAAEVRWNADFIRMACIGLLQKSNWKDDQEFQPFFQKILEEYIFRIKKTEKGIHLLDAMTLEFKGLSFFINELAAFVWTMCENHLRINLFSRVVKWIQFRFNIPNKKYATKILLEAFDLNSTERKADYTDIPVDHKIVTEYIGMLPSEENIGKNFDLFVKLSIKLLVDMEALALEKDSITGGFKKGVRVFSILPMKEGFSLSHVAFSNSSLQQLLTWIQRKERNPLTQTYPTFNLLESTDTLVTKAWFDTHKELIWNTLFNIKQVEKGKKKFAYRISTNGYSCSITMEVSRTVPVLRKSVNAKANSKRKTDAEYQLPNNFDFKKINRIVGIDPGYTTLFSASTSNERSKKDCISLSTKQYRHESKMHEQRYYYQNFLKHNPELTTIILATPSFKTADPEEILKGIDFLVEHADMLFQAFRKSALPKFKFKVKTFSAKTLTQHCKKIVGSTPKTCVVGVGDWSQKANGFLKGGVGASPNKKFLKELKQRQGVTVVLIDEYNTSQFCFTCKSKLEPVYLKCKLKRQEEKEEPEAITRKVHHVLHCSNNECGMYWNRDINSSHHHQHLMFNLATKQGRPSYLMRIQTNKG

SEQ ID NO: 4952 - protein, 441 aa, Sylvanvirus sp.
SEENIGKNFDLFVKLSIKLLVDMEALALEKDSITGGFKKGVRVFSILPMKEGFSLSHVAFSNSSLQQLLTWIQRKERNPFTQAYPTFNLLESRDTLVTKAWFDTHKELIWNTLFNIKQVEKEKKKFAYRISTNGYSCSITMEVSRTVPVFGKIIKSKANSKHKTDAEYQLPNNFDFKKINRIVGIDPGYTTLFSASTSNDRSKKDCISLSTKQYRHESKMHEQRYYYQNFLKRNPELRAIILETPSFKTADPEEILKGIDFLIEHADMLFQAFRNSALPKFKFKVKTFSAKTLTQHCKKIVGPTPKTCVVGVGDWSQKGNGFLKGGVGASPNKKFLKELKQRQGVTVVLIDEYNTSQFCFTCKSKLEPVYLKCKLKRQEEKEEPEAITRKVHHVLHCSNNECGMYWNRDINSSHHHQHLMFNLATKQERPDYLMRIQTNKG

SEQ ID NO: 4953 - protein, 205 aa, Sylvanvirus sp.
LKTIILATPSFKTADPEEILKGIDFLVEHADMLFQSFRKSALPKFKFKVKTFSSKTLTQHCKKIVGPTPKTCVVGVGDWSQKGNGFLKGGVGASPNKKFLKELKQRQGVTVVLIDEYNTSQFCFKCKSKLEPVYLKCKSKRNEEKEEPEAITRKVHHVLHCSNNECGMYWNRDINSSHHHQHLMFNLATKQGRPSYLMRIQTNKG

SEQ ID NO: 4954 - protein, 479 aa, Sylvanvirus sp.
MFKVLISKGGDYYPPYNNENENKNPSFHNYKHLMTREIMIGSAAATLAALAASRFRVCQPHQYMVRTGVFIKEMMVSKKGFHLPFQKCSFVNMSPASFSFELHHMSKDKVPFNLPISLTVSPFDYRVKPELFLNYARTMSALTDSSIENTIKSIANGEMRVLSASRTIEEMFSGREEFKRYITDIVQSDFNNFGLEIKNANIEEMKDLPNNFDFKKINRIVGIDPGYTTLFSASTSNDRLKKDCISLSTKQYRHESKMHEQRYYYQNFLKHNPELTTIILATPSFKTADPEEILKGIDFLVEHADMLFQAFRKSALPKFKFKVKTFSAKTLTQHCKKVVGPTPKTCVVGVGDWSQKRNGFLKGGVGASPNKKFLKELKQRQGVTVVLIDEYNTSQFCFKCKSKLEPVYLKCKLKRQEEKQEPEAITRKVHHVLHCSNNECGMYWNRDINSSHHHQHLMFNLATKKGRPSYLMRIQTNKG

SEQ ID NO: 4955 - protein, 508 aa, Terrestrivirus sp.
MFNINVELEKVGSKQIQFFPLRKSLYPKYIPLDTRALIDIYEENKNSYLDKIQEQKDNIWNKFINLNNKIFKHKNYVFNYFMMTDGFAVSLQFMHKNYIEKETEKKMKMKIARKKKRDETKSKNSILNDMSLDLNENISDNKIKQNKNMSSILNELDDEIKLEENKEVNKNKKEKEPTHIEFPYIDDLEGVELELLKEAYKIYIDPGKTNLFMMMDDKGIYFRYTNKQRVFETKRLQYQKRIENEKIKRNITLMETKLSSYNSNSCSIEKFQEYIEKKNITNVKLIKRYEDPLYRKLKWYSYLNSKRSDDNLLNTIEKKYGKDAVIIIGDWEIPKQMQNYISTPNIRLKRVLARKFKVYNFDEYKTSCINYKTETICENLKLKDPLKEGKIRKIHHILKYQTESGRLGCINRDKNAVNNYKKIIDHWMKTKERLKNYRREGREKPITPMKITSKKKGKEVSNKGESEQTHILTIEKIEKAKKKPSTKIVVKSKNKIIKVIPLKKFDFK

SEQ ID NO: 4956 - protein, 308 aa, White spot syndrome virus
YYQESWMTDRRKANETYKKNNKEYKEALEEITRYDNGEEIINDGNGDTSTPTKKFEAYLKVVNEHYRLLWNEKGKKKYRKNAMKVYSRKQKCISNFIDELIPKRDKIEDYHIAFGDAKFACTGRGEQYASPARIFAKKIKERVGGDKRFTFVDEKYTSKVCHRCNQPLNMLEKDCFSPNKKRKPPTIVTTTTTTTTEEDEENGKWKKATPLRENRDTRRCSSEKTQFGYSSNRKVSTGDISMETPVPSSTSSSFCTPTSITCVLGGKFVDRDFNASTNIVHKFLGFWDKKLMEKKDKMPLKYHFIRVA

SEQ ID NO: 4957 - protein, 778 aa, White spot syndrome virus
MSASLLTETSLEEEQRREVNNNTSKENDTMEKKTETAATTEKDPEPSVSKRSRNKEPKTTSTVYTSVKCYLSSIIKSESSRSNVTSTKERFEERCKSVSKMMVKGSLFLRLVVDECLRRYNHLEDEIDKWPDMTKDNFYVQLLRKGLDKKKLKEGSTHPVVEDVWNSPIVQETFLSQQGEGNNPIKRHLMDFNTITYAAKQLKTCFETNLRTHFRTRQQRAISGWLAENGFDKKYTKLVQHWIIGCTYKSDWVDSGDLERVKEGTKNFVTLHRKHLCVISDKKNGTISYSPEEKYPIPSILNYYKFLQTEYPQNKKIQKMIVVPKHKLKIHYCTFDQTTIQGICKDLGVWKDMEERHKQSEDILYKQGWYLLFDVKKIKKLRPNWNFHSIQTDGEGVSVLFSREVEEVETVSKKSKKNKKPRGDEDRRNYPPTNAKYVVGVDPGRTNVVSCSVFDTRQKRVVRKHRMTAKQYYQESWMTDRRKANETYKKNNKEYKEALEEITRYDNGEEIINDGNGDTSTPTKKFEAFLKVVNEHYRLLWNEKGKKKYRKNAMKVYSRKQKCISNFIDELIPKRDKIEDYHIAFGDAKFACTGRGEQYASPARIFAKKIKERVGGDKRFTFVDEKYTSKVCHRCNQPLNMLEKDCFSPNKKRKPPTIVTTTTTTTTEDEENGKWKKATPLRENRDTRRCSSEKTQFGYSSNRKVSTGDISMETPVPSSTSSSFCTPTSITCVLGGKFVDRDFNASTNIVHKFLGFWDKKLMEKKDKMPLKYHFIRVA

SEQ ID NO: 4958 - protein, 778 aa, White spot syndrome virus
MSASLLTETSLEEEQRREVNNNTSKENDTMEKKTETAATTEKDPEPSVSKRSRNKEPKTTSTVYTSVKCYLSSIIKSESSRSNVTSTKERFEERCKSVSKMMVKGSLFLRLVVDECLRRYNHLEDEIDKWPDMTKDNFYVQLLRKGLDKKKLKEGSTHPVVEDVWNSPIVQETFLSQQGEGNNPIKRHLMDFNTITYAAKQLKTCFETNLRTHFRTRQQRAISGWLAENGFDKKYTKLVQHWIIGCTYKSDWVDSGDLERVKEGTKNFVTLHRKHLCVISDKKNGTISYSPEEKYPIPSILNYYKFLQTEYPQNKKIQKMIVVPKHKLKIHYCTFDQTTIQGICKDLGVWKDMEERHKQSEDILYKQGWYLLFDVKKIKKLRPNWNFHSIQTDGEGVSVLFSREVEEVETVSKKSKKNKKPRDEDRRNYPPTNAKYVVGVDPGRTNVVSCSVFDTRQKRVVRKHRMTAKQYYQESWMTDRRKANETYKKNNKEYKEALEEITRYDNGEEIINDGNGDTSTPTKKFEAYLKVVNEHYRLLWNEKGKKKYRKNAMKVYSRKQKCISNFIDELIPKRDKIEDYHIAFGDAKFACTGRGEQYASPARIFAKKIKERVGGDKRFTFVDEKYTSKVCHRCNQPLNMLEKDCFSPNKKRKPPTIVTTTTTTTTEEDEENGKWKKATPLRENRDTRRCSSEKTQFGYSSNRKVSTGDISMETPVPSSTSSSFCTPTSITCVLGGKFVDRDFNASTNIVHKFLGFWDKKLMEKKDKMPLKYHFIRVA

SEQ ID NO: 4959 - protein, 526 aa, Megavirus baoshan
MFWNDQCAKLSKSLWIPSNTINLKSNKKKYFKCDNPNISFNYFTDGIKINKKIKFNDIKVTDNHDKKEKLRNKLIKTENTRYNKEQNNQKCKLNKQELNDKHKKFLDKIEIKVNQLDGFIRSRRIQILPNKKQQNIIQKWIYDTTSIYNKLVCNFNQIYDKCQKIVDNMNVENKFYHLGKIIKQNTEFPINFHKLRALKCSDFIQDYDRIPYCVIADIIKEFVSNIKSCITKISKGLITEFKFKPRKYNRICSSIPLESHYTTVRGFYPSIFGEIKTNEKIFSWLDIKHDYKLIYDKYSNKYYIHVPKYVYRNDLTIKKPIAIMDPGARTFQTIYGLDHIVTIGDDLGSTLKKRLLKIDNLKSKLSKPGKYKHNKKLDRKTKVKKWKYKRAIDRHHKKMDHIQQELHYKTANYLCSHYNRVVVTNFSSKKVGLKKNDLDAMTKRILGKLSHYRFRQRLLTKCEEYGSQYYEVDESFTSKTCCKCGNIHKTLGSSKIYDCIKCKNKIDRDVNASICILIKNKDILLK

SEQ ID NO: 4960 - protein, 424 aa, Moumouvirus australiensis
MYKKNSKILRTKAKKGCIHVVSKNKSSSKTTKNKSQCGSKLYNKYFCSKHKHIKPKLDLPLGFVFWRNKIIKKNGDLSEDEKWLSEIPYDTRQLVIKNILANHKSAITNLKNGHIKTFDIKYKSRKNKNQFLFVDYRALKPDGKLWGRTIKTPLGMRKGEKRWFDNYMKEYELKKFGDDKGDKERKDMIITREYPGMYYLHIPYTKTIENKPIQESIISIDPGIRTFHTFYDPEGKCGKIGDNLTNHIIRLYEKIDKIQSKITKTNTKNNDLGYKKNKICRQNMRKRCAWLRTKIKNTIRDYHWKTASFYCKNYGHVIIPKLDTDSLKKRIKKDYGLSKGSPMIRRIMALSHNEFINKLLHKSKQYNTNVLIVNEAYTSVTCGNCGIKHEKLGSNKIYKCIHCKRKIDRDINGARNILIKTLSK

SEQ ID NO: 4961 - protein, 606 aa, Heliothis virescens ascovirus 3j
MPPSCKSCGVEGHSRRTSKSCGNYLPPIRQRTDCGGVSTEDFDVGVVKRGLNGVLCPLMDEDVRRRLTAEIRSDVVELSRLYVLLGVFVNHCWNAYPNDESNSVRTFQDMMTYVYALKGKGPHAQKFDDMVRYHDGITYYNGRLRNYSVQEMAKTYWTVSKTNITTHAYSRLARYFGVKRNDPTLFAAYYHKEFGDDDISRVCRFINVSSEWHSTIPMWIDIQREMYARGEQSFVIFPQPSHGLKHVTYTSKGWHELLRRVTPSTITSSWPSITDHKKELWAPYLDTSVVDMKKFGCCIQTDGVAVSLSMNRPKRKPSLRKKPISMPPEPYITDTFNEDRIVAVDPGSRVPVAACDSRTGFKRITKRWVRSHTLEWKRERYRSSKLRKIELDEAADRHRIELDRGVQITCRNGHQVKLYTDFRLKWFDARQRPFERTRKLTRLSFDKYMMTARTNERIVTETFLGDTPNDRVLVLYGAGVNFVNVACYSGRKFKHTDLLRRLRSRRNIRVRIVDESYTSKACSDCNELRNGTYTRLRINHRLRRGVCPDCNADVERDYNAAKNILVNFQRSAVCRPSPSCDSGVTSDEDSHSIRPIIQCTVSQPGS

SEQ ID NO: 4962 - protein, 605 aa, Heliothis virescens ascovirus 3j
MPPSCKSCGGEGHSRRTSKSCANYLPSIRQRSNCDGASTEDFDVGVVKRGLNGVLCPLLEENVRRRMTAEIRSDVVELSRLYVLLGVFVNHCWNAYPTDESNCIRTFQDMMNYVYALKGKGPHANKFDQMVRYHNGITYYNGRLRNYTVQEVAKTYWTVLKTNITTHAYSRLARYFGVKRNDPTLFAAYYHKEFGDDNISRVCRFINVSSEWHSTIPMWIEIQREMYARGEQSFVIFPQPSHGLKHVTYTSKGWHELLRRVTPSTITSSWASITDHKKELWAPYLDTSVVDMKKFGCCIQTDGVAVSLSMNRPKRKPIIRKPTSILIKPCVTDTFNEDRIVAVDPGSRVPVAACDSRTGFKRITKRWVRSHTLEWKRERYRSRKLRRVELDEAEDRHRVELDRGVQITCRNGHQVKLYTDFRLKWFDARQRPFERTRKLTRLSFDKYMMTARTNERIVRETFLNDTPSDRVLVLYGAGVNFVNVACYSGRKFKHTDLLHRLRSRRNIRVRLVDESYTSRACSDCNELRNGTYTRLRMNHRLRRGVCPDCNADVERDYNAAKNILVNFQRSAVCRPSPSCDSGVTTERDSHSIRTIIQCTVIEPGS

SEQ ID NO: 4963 - protein, 650 aa, Emiliania huxleyi virus 202
MPRNKKDDTRVIKCPLDKILKPGIVSIIRDIVPVYNRITISATVFLNLRIRQLVESRASSEEFAQFFQANKLVKHFMAVTSSNTGAGDLYTAFGTNFPSVTREDRPKAFSQVCMYICRNLETTATTNVWYHMKKRVCTIVSKTFGIPRNEWLQMSDEEKKNHKIHLKQVKVDVLSLEGDAFISPEQYHDWISDLRSEMKVTHVTRQLLADTRGIDVDDPNVPGMVYYMKVKPCEFIYAIATLSSRLNALTGGGYALYPIRSSMVPKYLHLDELILSDIAPGIARSSANAAAGKKRTADGSELSNKDKLTARRMIVFKHVMTPKAFNKWKNQLDWSVDTDGYGCSLHTKKKVHERPPSESPSIHNGLFKIDEFKDKFSGRYSIDDISAVGIDPGKREIVSAVDSTDYTSKYTFRKTHQDHLTGTVRHRKAMERVKSQTIFETEQDLATTSKKVVPVERFMNYATKLATSISSSSGFYEQGVYRKRKWKRHLRLQKAYSSIVNNLKKVSCYPHKPIVLAYGSWGMSTSGLPFRGLPPTIGIGMIRYLARFFPVVITPEYYTSTICPCCESNVTRCTHVEQQRASPFFENGKLKEIRGLKHCPGCNTYFNRDNMGAWNIARNFTNMYQGMAPIRVRNAAQAAEQELTNRTEVD

SEQ ID NO: 4964 - protein, 650 aa, Emiliania huxleyi virus 88
MPRNKKDDARVIKCPLDKILKPEIVSIIRDIVPVYNRIAISATLFLNLRIRQLVESRASSTEFAQFFQANKLVKYFMAVTSSTLGAGDLHAAFGTNFPSVIREDRPKAFSQVCMYICRNLEATATTNVWYHMKKRVCTVVKKTFGIPRDEWLHMSNEEKKNHKIHLKQVNVDVLSLEGDAFVSPEQYHDWISNLRSEMKVTHVTRQLLADTRGVDVDDPNVPGMVYYMKVKPYEFIYAIATLSSHLNSITGGGYALYPIRSSMVPKYLHLDELILADISPGISKGATNTAAGKKRTADGSELSNKDKLVARRMIVFKHVMTPKAFNKWENHLGWSVDTDGYGCSLHVKKKVNELPPSTHPSIHNGLIKIDAFKDKFSERYSINDLSIIGVDPGKREIVSAVDSMDYTSKYTFRKTHQDHLTGTVRHRKAMECTKPQSVFETEQDLATTSKKVVPVERFMDYATKLATSISSSSGFYEQGVYRKRKWKRHLRLQKAYSGIVNNLKMVSCHPNKPIVLAYGSWGMTTSGLPFKGLPPTIGIGMVRYLARFFPVVITPEYYTSTICPCCDSNVTRCTHVEQQRASPFFENGRLKEIRGLKHCPGCNTYFNRDNMGAWNIARNFTNMYQGMAPIRVRNAAQAAEQELTNRTEVD

SEQ ID NO: 4965 - protein, 637 aa, unidentified
  source 1..637: note = Dishui Lake large algae virus 1
MKPPDPRPIEGKHILTVKKTALRNIVGNDPMILSRIQDAVYRKHVIVQHTTHFMKLYLLSLFEKGDVLPMIDVDFIAISMRVVSNMPPEENRRGRPPNASTRALMNQLECFYKEHYEPLLGKNPEEMRTTLYRIGDMLQYEEKDILKNIKNNIFLHFTDYVKEFINKEFNLKETLSKVDAMALTEEEKRLTKRSISIELRHVKNDLLSPLGTVLTSPVKYHEWICQHKSKLIPKEKYLKNNIEYDVKAKPMDYLSSMFYVCSQLEKYGRHVHAFPLCTSTIPSYATIDTTTLIMLMIDDNALMFRKKVKESKEDVWGSFFQLGNKAFRRKDYRFHYMIKTDGVGASILFHRKDQNPDKLDDDTICTVKEKYIDEIEVPQDKNIIGIDVGLDDILYCTDGTSFYRYSANQRRVQTKTKKYMNIMDSLKKEHLVEGMSVKEWETILSLYNKYTCSFSKFKEYVEQKTTITYTLTPFYTNTLLRKLKWNCYINRQRSEAKMLNKLKEQFGEPDKAIVAIGDWDQGSYHMKGKEPTKGKGMRKVLRQGGYEVYLVDEFKTSCTCHNCHGECKKWLYRPSHKPRNLGENTLVHGLLRCTSVNGCGSLWNRDVNGCLNICMLAHKAVQKEERPLAFQRGIHIC

SEQ ID NO: 4966 - protein, 575 aa, unidentified
  source 1..575: note = Dishui Lake large algae virus 1
MEDTTKERKRPDVVQRLKDRKGKQERVVKCSLQKALKEKRLMPEIQKWVSTVSKVTNKGSLVFNRLLLHCLRNDLPLPDLQDQTLYLQCFNIGIGQVRKSIEPLRDVWENVFSGFPTIEKARGDTQAYVYASKQYMTNFKNSLVYPFERRQKAFIARWCRENGLEKDQVYAIRCAINRWGCRTDIVPQATPFVDQQRKLLGTLTEDDEVTHTWLGAHMDNVVRYYWYILCYNEQFDDARRFTLAPISSIKSHYLTIDTTVLFEMMKNCNLTSGKKDAFVELRDDHFGSCFSYSKLCRKGVYTHMLETDGASVCFHFHVPKAEKVKENRILKKSDRVIAIDPGRSNLIYAVDDTTKETYRLTRQSYYTSAGMKTMNRKASKWEKDIEGAELVYRKHSLKTTKEETWDLFLKDYSSVYDTLWNAKTEKKWGRERFKVYGLKRKTLDNFFQTMKGEKQPVIAYGAARFNPTSKNELSAPTTFVSHRCAKHFPVIMVDEYNTTKVCHCCNQKLCPVVKNQQEVRGLRWCCSTNCRTFLNRDLNAALNIARCFRSGTCRPHSLCRNSGISLVASKPLRIY

SEQ ID NO: 4967 - protein, 508 aa, unidentified
  source 1..508: note = Dishui Lake large algae virus 1
MLEADLTTREQDFAPYWSDCSKEISGGLWLPTRTGLPVSDLTSFNGSSPNLGLYWKAWSSPTQTQERTWSPTSWRFSQSLQPVTTGKESIVTGRRYRIYPDSVQKALFRKCFGAHRYFYNRAVAEINRRYKNRKAEFHKMEHCVLCNNDRLEGSFCCEKHKGTKLPWKLDVTLASLRSAVMVSDKDAKGTTMAWQMEVPYDTRQLAIKDAIAAYKACTTNLTRGNIDGFQLNYKRKSSRQICWVNDTAIVRKNGDVKIFQQRLKQNASLKFKSKDRKKVPKKFDSDAKILYDRGAYYLVTTESAKKEEHKNRKPIVALDPGVRTFQTGYSPTGEVFKAGEGRIQRMKLLHSKIDLLRSVRTRIQKPTTRHRINKRLEKIERALYGLVDDLHNHTASALVKSYDTILLPTFGTSEMLVTDDIASGVKRRMAGLSHYRFQQKLKHQCEKHGATLYLVGEEYTTQACGCCGRLKKVAGSKIYTCDNCGYTMDRDVHGARNILIKTCSTFGR

SEQ ID NO: 4968 - protein, 473 aa, Faustovirus
MHLFNEQGILEVDLQRLRKVSEAEKFTRSETGFWNQNCSVIKDKYIDNLTLTNHDNPTDVIVSRRILIKPNYLQRKLLTECFHAYRYVYNQAVELIFRILDLSRRVGCTMMTKTIKMAVYKYVKITDDIVPDFVLILPADSRKEALREAVKNYSTCITHMRRGLCKKFLLKHKRRDAMTFRIKTNAIKLEKNKLVIFRDRIIERIREVAIEREGKCTAKSVKKYNHLRYADIDKGNRSRLSPYLDENGNPISWPQITYSHGKYYLIVSGTRKAESTEDKKEICAIDPGVVNFHTIYDRETTFIEGHKLYETKLQSINQRIDKLVRAKQYVTGAKLKHMQERELKLRAKVSNIVYDFRHKLASELCNKYKVILLPKLGIKQVAKNLRKMVNRKLYALSHCKFNELIKQIARRTGTTVIHCLESYTSKTCGNCGNLQSVDNDRIFRCISCQYVCGRDENACKNILIRTLNNYLLS

SEQ ID NO: 4969 - protein, 478 aa, Faustovirus
MNYISMRLFNEQGNLKVDLQRLRKVSEAEKFTRSETGFWNQNCSVIKDKYIDNLTLTNHDNPENVIVSRKILIKPNYLQRKLLMECFHAYRYVYNQAIELIFRILDLSEKTGCKIMPSTIKTAVYKYVKITDDIVPDFVLPLPADSRKEALREAVKNYSTCITHMRRGICKKFLLKHKRRDAMTFRIKTNAIKLEKNKLVIFRDRIIERIRDVAVEREGKCTAKSIKKYNHLRYADIDKGNRSRLSPYLDENGNPTSYPIITYSHGKYYLIVSGTREAEITKDKKEICAIDPGVVNFHTIYDRETTYIEGHKLYETKLQSINQRIDKLVRAKQYVTGAKLKRMRLRELKLRAKVSNIVYDFRHKLASTLCNKYKVILLPKLGIKQVAKHLRRTVNRKLYALSHYKFNELIKQIAQRTGTTVIHCLESYTSKTCGNCGNLQSVDDDRIFRCALCQYVCGRDENACKNILIRTLNNYLLS

SEQ ID NO: 4970 - protein, 478 aa, Faustovirus
MNYISMRLFNEQGNLKVDLQRLRKVSEAEKFTRSETGFWNQNCSVIKDKYIDNLTLTNHDNSKNVIVSRKILIKPNYLQRKLLMECFHAYRYVYNQAIELIFRILDLSEKTGCKIMPSTIKTAVYKYVKITDDIVPDFVLPLPADSRKEALREAVKNYSTCITHMRRGICKKFLLKHKRRDAMTFRIKTNAIKLEKNKLVIFRDRIIERIRDVAVEREGKCTAKSIKKYNHLRYADIDKGNRSRLSPYLDENGNPTSYPIITYSHGKYYLIVSGTREAEITKDKKEICAIDPGVVNFHTIYDRETTYIEGHKLYETKLQSINQRIDKLVRAKQYVTGAKLKRMRLRELKLRAKVSNIVYDFRHKLASTLCNKYKVILLPKLGIKQVAKHLRRTVNRKLYALSHYKFNELIKQIAQRTGTTVIHCLESYTSKTCGNCGNLQSVDDDRIFRCALCQYVCGRDENACKNILIRTLNNYLLS

SEQ ID NO: 4971 - protein, 478 aa, Faustovirus
MNYISMHLFNEQGNLKVDLQRLRKVSEAEKFTRSETGFWNQNCSVIKDKYIDNLTLTNHDNPENVIVSRKILIKPNYLQRKLLMECFHAYRYVYNQAIELIFRILDLSEKTGCKIMPSTIKMAVYKYVKITDDIVPDFVLPLPADSRKEALREAVKNYSTCITHMRRGICKKFLLKHKRRDAMTFRIKTNAIKLEKNKLVIFRDRIIERIRDVAVEREGKCTAKSIKKYNHLRYADIDKGNRSRLSPYLDENGNPTSYPIITYSHGKYYLIVSGTREAEITKDKKEICAIDPGVVNFHTIYDRETTYIEGHKLYETKLQSINQRIDKLVRAKQYVTGAKLKRMRLRELKLRAKVSNIVYDFRHKLASTLCNKYKVILLPKLGIKQVAKHLRRTVNRKLYALSHYKFNELIKQIAQRTGTTVIHCLESYTSKTCGNCGNLQSVDDDRIFRCALCQYVCGRDENACKNILIRTLNNYLLS

SEQ ID NO: 4972 - protein, 473 aa, Faustovirus
MHLFNEQGNLEVDLQRLRKVSEAEKFTRSETGFWNQNCSVIKDKYIDNLTLTNHDNSTDIIISRKILIKPNYLQRELLTECFHAYRYVYNQAVELIFRILDLSEKTGCKIMPSTIKMAVYKYIKITDDIVPDFVLPLQYDSRKEALREAVKNYSTCISHMRSGLCKKFLLKHKRRDAMTFRIKTSAIKFEKNKLVIFRDRIIERIREVAVEREGKCTAKSIKKYNHLRYADIDKGNRSRLTPYLDENGNPMSWPLITYSHGKYYLIVSGTREAEITKDKKEICAIDPGVVNFHTIYDRETTVIEGHKLYETKLQSINQRIDKLVRAKQYVTGAKLKRMRLRELKLRAKVSNIVYDFRHKLASKLCNKYKVILLPKLGIKQVAKHLRRTVNRKLYTLSHYKFNELIKQIARRTRTTVIHCLESYTSKTCGNCGNLQSVDNDRIFRCALCQYVCGRDENACKNILIRTLNNYLLS

SEQ ID NO: 4973 - protein, 473 aa, Faustovirus
MHLFNKRGVLEVDLQRLRKVSETEKFTRSETGFWNQNCSVIKDKYIDNLAFTNHDNCKDVIVSRKILIKPNYLQRKLLTECFHAYRYVYNQAVELIFHILNLSRRVGCVMTTKTIKMAVYKYVKITDDIVPDFVIVLPADSRKEALREAVKNYSTCITHMRKGLCKKFLLKHKRRDAMTFRIKTNAIKLEKNKLVIFRDRIIERIREVAVEREGKCTAKSVKKYNHLRYADIDKGNRSRLSPYLDENGNPMSYPIITYSHNKYYLIVSGTRKAESIKDKKEICAIDPGVVNFHTIYDRETTVIEGHKLYESRLQSINQRIDKLVKAKQYVTGTKLKRMRERELKLRAKVSNIVYDFRHKLASKLCNKYKVILLPKLGVKQVAKNLRKTINRKLYALSHYKFNELIKQIALRTGTTIIHCLESYTSKTCGNCGNLQSVDDDRIFRCTLCQYVCGRDENACKNILIRTLNNYLLS

SEQ ID NO: 4974 - protein, 462 aa, Faustovirus
MKCSIHEYYQSILNGDLEGIFTRRNNEIKNPIRDYEFNNSARLLSLITPDQVDNINRNNIVDDALIYGIKHKLSPTVSVFGKIESNNTGFTAEDIQCSRKLRIYPTEIEKTKINKLFQISNAFYNFTIDGIENKTININNKSDIRAKSKVNDDVCETVHANAKMAYFHTRSLAAMSAVINYKSLLTNYRNGHIKHFKLSNAHSMQVAHFRSEDAKLKDNHLCIRDMKLKIRPRDLPWINTVGINQQVSIKKYNRKYYLIVPFKRRSCDNNTKGICAIDPGNRTLATYYSPDEIGKLGVNLIERVRKVNNRIDHLKRVKDTTKLVSRTRYGLKRRITKLNDKITRLVDYAQWKFAAYLTRKFRVVFIPRLANVVRGGINSTINRETRCLRHSQFITKLMHLGLVNGCHVIETKEYYTTRTCSGCGKRNENVGSSKIFGCSNCKMVMDRDINGAKNIWLRSLTN

SEQ ID NO: 4975 - protein, 305 aa, Faustovirus
MAIVEAVAAYKACQTKKKNKLLRSYTLKHRTKKNLSQHIRLDKRTIQLHKNKLCIMPDKCGDKITLSKDQLKQVKSAFNKNNPNHDIIITKQANKWYICVLIKNNKIETVKKDSLVALDPGGRTFQTYFSQNELGKFGDGFYENNIKPINERIDKLNAILPKLRGLRKRKLRNRVQQLRTKIVNKVSDLHNKVINYLTTNFTTILLPKFSAKQIATRSGRSINRMLHSLGHYKFSDKLEERCKLRNCEVIRCLESYTSQVCSSCGSMYKPFASHVYKCVGCQDNKDRDINAAKNIYLRSLTMLTK

SEQ ID NO: 4976 - protein, 463 aa, Faustovirus
MKFNIHRYYQSILNGDIESIFTKRKDEVNSPVCDYKFNNYTKLLSLTTHDEIKGIKRNETVEDSVIYETKPLTSPTISVFGKIEVDATGFVAEDVQCARKIRIYPTEMEKSKINKLFSISNAFYNLAIEGIENKTININNKTDIRQKCRVNDDVCSTVHVDAKLAYFDTRSLAAMSAVGNYKAMLTNYQNGNIKHFRLSNKHSTQIVYFSAKDAKLKNGCLCIRDMKLRLRNRDLPWLVEHGINQQVSIKRYNRKYYVVVPFKRRSLDNNAKGICAIDPGNRTFATYYSPDEIGKLGVNLIERIRKINAKIDHLRSVKDTAKLVSRTRYGLKQRIAKLSSKITRLVDYAGWKFAAYLTRRFRIVFVPRLANVVGKANSTVNRETRNLRHSEFINKLTHLGKVNGCKVVETKEYYTTKTCCRCGTRNDNVGSSKVFSCVNVACKFTIDRDVNGAKNIWLRSLTN

SEQ ID NO: 4977 - protein, 466 aa, Faustovirus
MHLFNEGGNLKVNLQELRKICESEKFQRSETGFWNQNCSIIKDKLLATEFINHDKATDTIISRKIKFKPNYLQRKLLNDCFGAYRWIYNKAIDVIFEVKKYSDKFNCIIDLKLVKKAIYGNVKINDDEIPDFIKILPSDSRKEALREAIKNYKTCLTHLNKKLCRRFLLKHKRRDDTTFRIKTNAIKLTGNKLVIFKKRILDLIEAGGLSENLRYATLNNGNLHRLKPYLNASGNPTAYPLINYSHGNYYIIVSGNRKVEQCNVKKEICAIDPGVVNFHTIYDGVVGYEGVKLYETRLEGINRRIDKITQHKQNFTGAKRKRMQLRELKLRAKVSNIVYQFRHTLASKLCAKYKVILLPKLGIKQVAKHLRRQVNRKLYALSHYKFNELIKQIASRTGTTVIHCLESYTSKTCGNCGNLQTCDVDRTFRCKVCGYVADRDENACKNILIRSLNNYILSCSSSGKRK

SEQ ID NO: 4978 - protein, 463 aa, Faustovirus
MKFNIHKYYQSILNGDIESIFTKRNGEIKDPVRDYKFNNYTKLLSLTTHDEIKGIKRNETVEDSVIYETKPLTSPTISVFGKIEVDATGFVAEDVQCARKIRIYPTEMEKSKINKLFSISNAFYNLAIEGIENKTININNKTDIRQKCRVNDDVCRTVHVDARMAYFHTRSLAAMSAVGNYKAMLTNHRNGNIKHFKLSNMHSTQIVHFRAEDARIKMGNLCIHDMKLRLRNRDLPWLVEHGINQQVSIKRYNRKYYVVVPFKRRSSDNNAKGICAIDPGNRTFATYYSPDEIGKLGVNLIERIRKINTKIDHLRSVKDTAKLVSRTRYGLKQRIAKLSGKITRLVDYIGWKFAAYLTRRFRIVFVPRLANVVGKANSTVNRETRNLRHSEFINKLTHLGKVNGCKVVETKEYYTTKTCCRCGIRNDNVGSSKVFSCVNVACKFTIDRDVNGAKNIWLRSLTN

SEQ ID NO: 4979 - protein, 464 aa, Faustovirus
MKFNIHKYYQSILNGDIESIFTKRNNEVKDPVCDYKFNNYTKLLSLTTHDEISGIKRNETVEDSVVYETKPLTSPTISVFGKLELDATGFTADDVQCARKIRIYPTETEKSKINKLFSISNAFYNLAIEGIENKTININNKTDIRRKCRVNDDVCNTVHVDAKMAYFDTRSLAAMMAVSNHKAMLTNHQNGNIKHFKLSNKHSTQIVYFSPKDAKLRDDHLCIRDMKLRIRNRDLPWLVEQGINQQISIKRYNRKYYVVVPFKRRSLDNHAKGICAIDPGNRTFATYYSPDEIGKLGVNLIEKVRKINVKIDHLNYIKDTVKLVSRTRHGLKQRIAKLSDKITRLVDYAGWKFAAYLTRRFRVIFVPRLANVVKGGRNSTVNRETRNLRHSEFINKLTHLGKINGCKVVETKEYYTTKTCCRCGIRNDDVGSSKVFSCVNAACKFTIDRDVNGAKNIWLRSLTN

SEQ ID NO: 4980 - protein, 482 aa, Faustovirus
MNIFLHYKYYDINIISMHLFNEGGNLKVNLQELRKICESEKFQRSETGFWNQNCSIIKDKLLATEFINHDKATDTIISRKIKFKPNYLQRKLLNDCFGAYRWIYNKAIDVIFEVKKYSDKFNCDIDIKLVKKAIYENVKINDDEIPDFIKILPSASRKEALREAIKNYKTCLTHLNKKLCRKFLLKHKRKDATTFRITTNAIKLTGNKLVIFKKRILDLIEAGGLSKDLRYATLNNGNLHRLKPYLDASGNPTAYPLITYSHGNYYIIVSGTRKVEQRVDKKEICAIDPGVVNFHTIYDGVVGYEGVKLYETRLEGINQRIDKITQHKQNFTGAKRKRMHLRELKLRAKVSNIVYQFRHTLASKLCNKYKVILLPKLGIKQVAKHLRRQVNRKLYALSHYKFNELIKQIALRTGTTVIHCLESYTSKTCGNCGNLQTCDVDRTFRCRACHYVADRDENACKNILIRSLNNYILSCSSSGKRK

SEQ ID NO: 4981 - protein, 445 aa, Haliotid herpesvirus 1
MSTKNAPELSTFQVRLKPTSAQKLALNLMIKVTNHAYNWCIHLVETKGFKPKQYDLQKVVAKTNSKDVDPDLRMSDDDWFFDNKLSTIKLTAIRQYASNYQIGLKKVKKREYASKMRVKEGKPALEITPGKNLPTEFKTELENEVSGCIAVQKLFVKPMSDLHIKRYKPRKPEMCLMILDASMKGPVLLARPVSHLPPLDHDMKIIKRPDKKFILCIPCEQSYTRKDFSTTEKTLAAVDPGVRTFATVYEPENNKFIEFGGEKWLSNSKIAKIQDKIDRINGEFQRAVERGDNRTADEFKRCLKKLHFKIKNKVDGLHRHVNGHIRKNYSQVAWGDMAPKQILMKDGLTHRTKRKMQMLSHGRQHEKLARIEGVTMQNEKYTSMTCSRCGYVNKKLGSAARYVCPNCEQDIGRDENASINIWRKYAGTFFRTIGGEHVYEDDVKK

SEQ ID NO: 4982 - protein, 757 aa, Ectocarpus siliculosus virus 1
MVRPSSDGNSHKKKKHKKIPPRAPPKNIPGFLQTVASLYPNQYLTASGNLPKSCKGTYCCQLFSRVRFGKEVSQQLRTRTVSVGFRAATTDEKRDTFQSKVNDAVDHLSRERVLASLFANFVFMERLQNGSALPEPDRAFFKSCLSSCILSRGGGSLNADFDRFSEITGLTRLVPPKSMNLDQQREHEAQRMATATSTRATHHAEKRRISITRWFLRGRISRGDLDCKKYATKLYNLAEKIITNFDGTPEDTQKLRTMSRAIDPGTDTNIIIDFAWQEKEFSDRDRGDGKSAETIKHLNWMFNTYVAESRRMYEEAVSRSHLFAPGKDKACRKKRDEFMKHELGEEFTYAPPKDTAVLPICSTGAVFIYIDMKTLGSWGLLHSNDAWWYKDVLRPFSKEANVKCLVNKENARYASSEHGYLSSLLESGPDKCPWMIGESFLTDGVQIKLLLKTLEHGRKAFSGSSELNEKGYNKLPRADVQLESLLGEGRGVYNISSLLKSTSIREDVVVMSADPGQAKVINVSSATARTWAKQDPGVILKTSTCVFGDDYRRDTLASRSDEYETFRRKGQPYGVAIDRLGNEKKRTSCLATFIQYCRRWCVNGPVLFRETLQTGRKFMRFDRFRATQKTLALIADKYMGHVEDTCRVMLFGKASFRAQKGRASAPRKALIREMASRGVVLMVNEYNTSKMCPGCGEDTVEDKERRIRSCKNFKIGSPEESCRLHRLTPEFEMDRDDVGSTNIGMRGFGKLLGQVWF

SEQ ID NO: 4983 - protein, 757 aa, Ectocarpus siliculosus virus 1
MVRPSSDGNSHKKKKHKKIPPRAPPKNIPGFLQTVASLYPNQYLTASGNLPKSCKGTYCCQLFSRVRFGKEVSQQLRTRTVSVGFRAATTDEKRDTFQSKVNDAVDHLSRERVLASLFANFVFMERLQNGSALPEPDRAFFKSCLSSCILSRGGGSLNADFDRFSEITGLTRLVPPKSMNLDQQREHEAQRMATATSTRATHHAEKRRISITRWFLRGRISRGDLDCKKYATKLYKLAEKIITNFDGTPEDTQKLRIMSRAIDPGTDTNIIIDFAWQEKEFSDRDRGDGKSAETIKHLNWMFNTYVAESRRMYEEAVSRSHLFAPGKDKACRKKRDEFVKHELGEEFTYAPPKDTAVLPICSTGAVFIYIDMKTLGSWGLLHSNDAWWYKDVLRPFSKEANVKCLVNKENARYASSEHGYLSSLLESGPDKCPWMIGESFLTDGVQIKLLLKTLEHGRKAFSGSSELNEEGYNKLPRADVQLESLLGEGRGVYNISSLLKSTSIREDVVVMSADPGQAKVINVSSATARTWAKQDPGVILKTSTCVFGDDYRRDTLASRSDEYETFRRKGQPYGVAIDRLGNEKKRTSCLATFIQYCRRWCVNGPVLFRETLQTGRKFMRFDRFRATQKTLALIADKYMGHVEDTCRVMLFGKASFRAQKGRASAPRKALIREMASRGVVLMVNEYNTSKMCPGCGEDMVEDKERRIRSCKNFKIGSPEESCRLHRLTPEFEMDRDDVGSTNIGMRGFGKLLGQVWF

SEQ ID NO: 4984 - protein, 432 aa, Paramecium bursaria Chlorella virus 1
MSKLTPWWSRKSQQLTKIIPWGTENVNTFQNDVIAKRVLRTRKVKLNPTKQQKMMLMKFADAARYSYNAAVSAVNDKTHNPNKIELQNAFLSLKRRDGTYNKFFQKRRWLLGCPQPIRQQAIFEAANNFKSAFTNLKNKNIDHFKMTYKTKKHQRKCGFSLGIGTHLKHNDGVLIILPRNLGQVRYFGSVPFEGKPDAECRIQRDPYGDHWLLVPVYKTTKTQTTKPIVAIDPGVRTPFACFGSNGGSKTLGEDMNAKLTDIRTRVSLVDRRISKCQDVSLKRKMREHRRRLFRKHQRVRDAYHWEIIKDITNEYSGVLLPPFETQRVSRMLKNKTNCSMLGISHFTFRMRMKGKCEEKGLLYTEPTEEYTSKTCGVCGQINYLLGSKKTFECFCGNVCDRDIHAARNILLKWLSTEAGARVVETFLASRSS

SEQ ID NO: 4985 - protein, 301 aa, Mamestra configurata nucleopolyhedrovirus B
MKKFGCCIQTDGVAVSLSMNRPKRKQTSTLPKSYVTNTFNEDRIVAVDPRSRVPVAACDSRTGFKRITKRWVRSHTLEWKRERYRSQKLRHVELNEVADRHRVELDRGVQITCRNGHQVKLYTDFRLKWFDARQRPFERTRKLTRLSFNKYMMTARTNERIVRETFLNDTPSDKVLVLYGAGVNFVNVACYSGRKFKHTDLLRRLRSRRNIRVRLVDESYTSKACSDCNELRNGTYTRLRMNHRLRRGVCPDCNADVERDYNAAKNILVNFQRSAVCRPSPSCDSGVTTDKDSHSIRPIIQ

SEQ ID NO: 4986 - protein, 564 aa, Spodoptera frugiperda ascovirus 1a
MPLSCKSCGGEGHTRRSSKSCANYLPPIRQRRNSGDVDHYTQDFDVGVVKQGLDGTICPLLRGDVRQRLTAEIRSDVVELSKLYILLGVFVNHCWNAYPDDESNSVRTFQDMMNYVYAIRGKGPHAKKFDDMVRYHGNIRRYDGRLRSFIVHEVAKTYWTVLKTNITTHAYSRLARYLGVKRNDPTLFAAYYHKEFGDDDSISRVCRFINVSSDWHSTIPMWIEIQRDMYARGERSFVIFPQPSHGLKHVTYTSRGWHELLRRVDPSNVTSNWPSITDHKKELWAPYLDTCVVDMKKFGCCIQTDGVAVSISMNRPKRTSVRRKAALPKSYTIDAFFEDRIVAVDPGSRVPVAACDSRTGFKRITKRWVRSHTLEWKRDRYRSRKLRRVELNEATDRQRVELDRGVQITCRNGEQVKLYTDFRLKWFDARQLPFERTRKLTRLSFNKYMMTARTNERIVRETFLSDTPSDRVLVLYGAGVNFVNVACYSGRKFKHTDLLRRLRAKRNIRVQLVDESYTSKACSECNELRNGTYTRLRMNHDFVAASVQTATPTSRGTTTPPKIY

SEQ ID NO: 4987 - protein, 606 aa, Spodoptera frugiperda ascovirus 1a
MPLSCKSCGGEGHTRRSSKSCANYLPPIRQRRNSGDVDHYTQDFDVGVVKQGLDGTICPLLREDVRQRLKVEIRSDVVELSKLYILLGVFVNHCWNAYPDDESNSVRTFQDMMNYVYAIRGKGPHAKKFEDMVRYHGNIRRYDGRLRSFIVQEVAKTYWTVLKTNITTHAYSRLARYLGVKRNDPTLFAAYYHKEFGDDDSISRVCRFINVSSDWHSTIPMWIEIQRDMYARGEQSFVIFPQPSHGLKHVTYTSKGWHELLRRVDPSNVKSNWPSITDHKKELWAPYLDTCVVDMKKFGCCIQTDGVAVSISMNRPKRTSVRRKAALPKSYTIDAFFEDRIVAVDPGSRVPVAACDSRTGFKRITKRWVRSHTLEWKRDRYRSRKLRRVELNEAADRQRVELNRGVQITCRNGEQVKLYTDFRLKWFDARQLPFERTRKLTRLSFNKYMMTARMNERIVRETFLSDTPSDRVLVLYGVGVNFVNVACYSGRKFKHTDLLRRLRAKRNIRVQLVDESYTSKACSECNELRNGTYTRLRMNHRLRRGVCPDCNADVERDYNAAKNILVNYQRSAVCRPSPSCDSGVATDTDPHSIRSIFQCAVSEPGS

SEQ ID NO: 4988 - protein, 548 aa, Paramecium bursaria Chlorella virus AR158
MGCSQPLETPRNIISATIRPSGSGPMRESSGPSTPQEASVATNSRNVRNPKRPITVTAGSVPQSNTMTSNDRSSPCGPSSQDTESSPTSVPESTGNVRALKPFWNPRCTELADVLWLPTETVSPVLASNSSSGSFEPTEPTSWFNTKTWTPHRQQSSQKTSSQSPLFSPANITGSVAMPKKAMISRKVEIFPNVKDAMVLKRWCGLYRRMYNLAIEKMLDTGRWHWKGHKVLTTYDNIPKNEKVRLLPTNIRKEAYREASTAMAKAPHKNTVKFKTLKRNGRSLRVFGAVSIVDTPDGKRIKLTDSQKHKQLSKELIGFDQKNLADIRIGSSSQIVYDGKWWLLSPFEVERSNVPKKHAVALDPGVRTFQTTYSPDGTSKKLGDQASCRIFRLMKYIDKLAVFKDKRTRGKRLRLERRVGNLVDEMHWKIARELATDYDTIIIPPFETQKMAKKWKNGRYRKINKTAVRMMLRLAHYRFRERLIHVANKLGTRVVICTEEYTSKTCGNCGVVNADLGSAKKFKCPRCHIHVDRDGNGARNILIKSVCC

SEQ ID NO: 4989 - protein, 379 aa, Paramecium bursaria Chlorella virus AR158
MLMKYANAARYSYNIAIAAVNDKTHKANKIELQNAFLSLKRRDDGSYNQFFQKRRWLLATPQPIRQQAIFEAAKNFKAAFTNLKNKNIDHFKMKFKTKKHQRQHGFSIGIGTHLKHNDGVLSILPRSLGQMRYFGSLPFEGKPDAECRIQRDPYGDHWLLIPVYKITKTQTTKPIVAIDPGVRTPFACFRSDGDSKCIGEDMNAKLVDIKTRVSIVDRRISKCQDVALKRKLREHRRVLFRKHQRVRDAYHWKIINDITDECSGVLLPPFETQRVSRMLKAKTNCSMLGISHYTFRMRMKDKCEEKGLLYDEPTEEYTSKTCGVCGLINYLLGSKKIFECFCGNVCDRDVHAARNILLKWLSSEAGARVAETFLASRSS

SEQ ID NO: 4990 - protein, 608 aa, Heliothis virescens ascovirus 3e
MPPSCKSCGGEGHSRRSSKSCLNYLPSIRQRSNCDDVSTEDFDVGVVKRGLNGVLCPLLDEDVRRRLTAEIRSDVVELSRLYVLLGVFVNHCWNAYPNNESNGVRTFQDMMNYVYALKGKGPHAHKFDDMVRYHDGITYYNGRLRNYSVQEMAKTYWTVLKTNITTHAYSRLARYFGVKRNDPTLFAAYYHKEFGDDDISRVCRFINVSSDWHSTIPMWIEIQREMYARGEQSFVIFPQPSHGLKHVTYTSRGWHELLRRVTPSNITSNWPSITDHKKELWAPYLDTSVVDMKKFGCCIQTDGVAVSLSMNRPKRKPALRKKPISTLPKSYVTDTFNEDRIVAVDPGSRVPVAACDSRTGFKRITKRWVRSHTLEWKRERYRSRKLRRVELDEAEDRHRVELDMGVQITCRNGHRVKLYTDFRLKWFDARQRPFERTRKLTRLSFDKYVMTARTNERIVRETFLNDTPSDKVLVLYGAGVNFVNVACYSGRKFKHTDLLRRLRTKRNIKVRLVDESYTSKACSDCNELRNGTYTRLRMNHRLRRGVCPDCNADVERDYNAAKNILVNFQRSAVCRPSPSCDSGVTTERDSHSMTIRIIFQCAVSELGS

SEQ ID NO: 4991 - protein, 608 aa, Heliothis virescens ascovirus 3e
MPPSCKSCGGEGHSRRSSKSCANYLPSIRQRSNCDGASTEDFDVGVVKRGLNGVLCPLLEEDLRRRLTAEIRSDVVELSRLYVLLGVFVNHCWNAYPNDESNSVCTFQDMINYVYALKGRGPHAHKFDEMVRYHNGITYYNGRLRNYTVQEMAKTYWTVLKTNITTHAYSRLARYFGVKRNDPTLYAAYYHKEFGDDDISRVCRFINVSSDWHSTIPMWIEIQREMYARGEQSFVIFPQPSHGLKHVTYTSRGWHELLRRVTPSNITSNWPSITDHKKDLWAPYLDTSVVDMKKFGCCIQTDGVAVSLSMNRPKRKPALRKKPISTLPKSYVTDTFNEDRIVAVDPGSRVPVAACDSHTGFKRITKRWVRSHTLEWKRERYRSRKLRRVELDEAEDRHRVELDMGVQITCRNGHRVKLYTDFRLKWFDARQRPFERTRKLTRLSFDKYVMTARTNERIVRETFLGDTPSDRVLVLYGAGVNFVNVACYSGRKFKHTDLLRRLRSRRNIRVRLVDESYTSKACSDCNELRNGTYTRLRMNHRLRRGVCPDCNADVERDYNAAKNILVNFQRSAVCRPSPSCASGVTTKRDSHSMTIRPIFQCALSEPGS

SEQ ID NO: 4992 - protein, 608 aa, Heliothis virescens ascovirus 3e
MPPSCKSCGGEGHSRRSSKSCLNYLPSIRQRSNCDDVSTEDFDVGVVKRGLNGVLCPLLDEDVRRRLTAEIRSDVVELSRLYVLLGVFVNHCWNAYPDNESNGVRTFQDMMNYVYALKGKGPHAHKFDDMVRYHDGITYYNGRLRNYSVQEMAKTYWTVLKTNITTHAYSRLARYFGVKRNDPTLFAAYYHKEFGDDDISRVCRFINVSSDWHSTIPMWISIQREMYARGEQSFVIFPQPSHGLKHVIYTSRGWHELLRRVTPSNITSNWPSITDHKKELWAPYLDTSVVDMKKFGCCIQTDGVAVSLSMNRPKRKPALRKKPISTLPKSYVTDTFNEDRIVAVDPGSRVPVAACDSHTGFKRITKRWVRSHTLEWKRERYRSRKLRRVELDEAEDRHRVELDMGVQITCRNGHRVKLYTDFRLKWFDARQRPFERTRKLTRLSFDKYVMTARTNERIVRETFLNDTPSDKVLVLYGAGVNFVNVACYSGRKFKHTDLLRRLRSRRNIKVRLVDESYTSKACSDCNELRNGTYTRLRMNHRLRRGVCPDCNADVERDYNAAKNILVNFQRSAVCRPSPSCDSGVTTERDSHSMTIRIIFQCAVSELGS

SEQ ID NO: 4993 - protein, 606 aa, Heliothis virescens ascovirus 3e
MPPSCKSCGGEGHSRRSSKSCLNYLPSIRQRSNCDDVSTEDFDVGVVKRGLNGVLCPLLDEDVRRRLTAEIRSDVVELSRLYVLLGVFVNHCWNAYPNNESNGVRTFQDMMNYVYALKGKGPHAHKFDDMVRYHDGITYYNGRLRNYSVQEMAKTYWTVLKTNITTHAYSRLARYFGVKRNDPTLFAAYYHKEFGDDDISRVCRFINVSSDWHSTIPMWIEIQREMYARGEQSFVIFPQPSHGLKHVTYTSRGWHELLRRVTPSNITSNWPSITDHKKELWAPYLDTSVVDMKKFGCCIQTDGVAVSLSMNRPKRKPALRKKPISTLPKSYVTDTFNEDRIVAVDPGSRVPVAACDSHTGFKRITKRWVRSHTLEWKRERYRSRKLRRVELDEAEDRHRVELDMGVQITCRNGHRVKLYTDFRLKWFDARQRPFERTRKLTRLSFDKYVMTARTNERIVRETFLGDTPSDRVLVLYGAGVNFVNVACYSGRKFKHTDLLRRLRSRRNIRVRLVDESYTSKACSDCNELRNGTYTRLRMNHRLRRGVCPDCNADVERDYNAAKNILVNFQRSAVCRPSPSCDSGVTTERDSHSIRPIIQCAVIELGS

SEQ ID NO: 4994 - protein, 608 aa, Heliothis virescens ascovirus 3e
MPPSCKSCGGEGHSRRSSKSCLNYLPSIRQRSNCDDVSTEDFDVGVVKRGLNGVLCPLLDEDVRRRLTAEIRSDVVELSRLYVLLGVFVNHCWNAYPNNESNGVRTFQDMMNYVYALKGKGPHAHKFDDMVRYHDGITYYNGRLRNYSVQEMAKTYWTVLKTNITTHAYSRLARYFGVKRNDPTLFAAYYHKEFGDDDISRVCRFINVSSDWHSTIPMWIEIQREMYARGEQSFVIFPQPSHGLKHVTYTSRGWHELLRRVTPSNITSNWPSITDHKKELWAPYLDTSVVDMKKFGCCIQTDGVAVSLSMNRPKRKPALRKKPISTLPKSYVTDTFNEDRIVAVDPGSRVPVAACDSHTGFKRITKRWVRSHTLEWKRERYRSRKLRRVELDEAEDRHRVELDMGVQITCRNGHRVKLYTDFRLKWFDARQRPFERTRKLTRLSFDKYVMTARTNERIVRETFLGDTPSDRVLVLYGAGVNFVNVACYSGRKFKHTDLLRRLRSRRNIRVRLVDESYTSKACSDCNELRNGTYTRLRMNHRLRRGVCPDCNADVERDYNAAKNILVNFQRSAVCRPSPSCDSGVTTERDSHSMTIRIIFQCAVSELGS

SEQ ID NO: 4995 - protein, 572 aa, Helicoverpa armigera granulovirus
MPVCKSCGGLDHQRRSSTKCANFLPQVRKRKLEPQQVNLDLQVYVVKRGLQSALCPLLSDDDRNRLLYEIRRDVRDLSRVYIELGILFNYYMKRCDTLPDKPDVLNFFYAMKGKGPYAACYKHLAGDQVYDGKLRSFVVQELAKQYETLIHTNIETHAYSRLARYFGVKKNDHGLFLAYYKKDFSQATEDMIRVCQIINVDSCKKNWWSTVPLWLKIQQDLFDRDNVESFRLFPQPSYGLKHLTYTSRGWHELLRRVKPDSVPSHWPNIQDHIKELWAPWLKSTKNFGCCLQTDGVSVSLSMNRWIKKVTKNGITKEVVIKKWKPSYDKLIAVDPGSRVPVAAFNSHGFYKRVTSKFVKSHSLDWKRERVRTKLTKSSETAEAKDRERVQTTCNIVLSSKNTSHVVEYTVFRLKWFDVRQKPYETHSKLTRLMFDKYINTAKLQEKIVKEVFDGGGVEKTLVLYGAGSKFMNAAQFSGRKFKHDALLKKLRQKRNIHVEIVDESYTSQACSTCNQQTGEFSKIVMDHKKRVGVCPNCASRFDRDQNAAKNILINFMRSTVCRPRCSYTKRVS

SEQ ID NO: 4996 - protein, 576 aa, Helicoverpa armigera granulovirus
MPVCKSCGGLDHQRRNSINCANYLPPVRKRKLEPAQENLELQIYVVKRGLQSALCPLLSDEDRNRLLYEIRRDVRDLSRVYIELGILINYYMKRCDTLPDKPDVLNFFYAIKGKGPYAACYKHLAGDRVYDGKLRSFVVQELAKQYETLIHTNIETHAYSRLARYFGVKKNDHGLFLAYYKKDFSQATEDMIRVCQIINVDSCKKNWWSTVPLWLKIQQDLFDRDNVESFRLFPQPSYGLKHLTYTSRGWHELLRRVKPDSVPSHWPNIQDHIKELWAPWLKSTKNFGCCLQTDGVSVSLSMNRWVKRVTKSDGVIKEVVIKKWKPSYDKLIAVDPGSRVPVAAYDSNGVYKRVTSKFVKSHSLEWKRDRVRTKHTKSSELAEAKDRESINQACNIVLSSKNTSHVVEYTVFRLKWFNVRQTPYDTHSKLTRLKFDKYINTAKLQEKIAEEVFDGGGVEKTLVLYGAGSKFMNAAQFSGRKFKHDALLKKLRHRSNIHVEIVDESYTSQACSTCNQQTGEFSKIVMDHKKRVGVCPNCASRFDRDQNAAKNILINFMRSAVCRPRCSYTKKGIVAS

SEQ ID NO: 4997 - protein, 645 aa, Paramecium bursaria Chlorella virus NY2A
MKCPRKMSKKPQNSLLPEELEKSSESVMPLSDDGRKRRKSKASSHLLEEDSIMSKTFSASFVLQLMTRLFLEDRSRFCMLVSLLRSREMTFKDKSISSKKNIQTLKLSQTSQVVSTGNVKASGSSWISRVPEVSNELSWRSVIDSADLHSSSSNMSSVSMAPSSKLSDLRNLLQNKNSKKTSSALSKCSAVEEMEKDDTKGRKKTKIPKNHVIATRIIKIRPTKSQKQQIDKIAGVVRFCYNASINEINKMRCHEISWPSGKLDQHLRNKFSIGKHNDIEQYISIHGNNIEPEQIIETTKMNTETRKKEPSRRYINPFFLGKLWLSECPKDFRARATFKAADAYKTSLTLWRKGLIRSFEMKFSTKRRELDRGYCFGIEKKVKFEDTGLKKRDGKLIITGIDGDIRFFEKPPINKEPVAGCELSKDSCGDYYLHVPIFRKKKERKGDNFVAIDPGGVVPWAFYASKGESGCLGTEMNERMSNVSKKISTIDKKLSGQPKGDKNSNDVIERRKLFRKKKRIRDHEHYRVINFLTDRYDGIILPKLKTKNISKALKSKANHDMFDISHYTFLRRVGERCIESDTILEHPGEQWTSKTCGRCGKSNLPGRERRGTFREYKCLYCGLHAHRDVHAARNIFMKWYIELKK

SEQ ID NO: 4998 - protein, 432 aa, Paramecium bursaria Chlorella virus NY2A
MTLKPWWSNKSQQLTKIISWNPTNTNIFQNDTTIKKVLRTRKVKLNPTKQQKMMLMKFADAARYSYNIAIAAVNDKTHKANKIELQNAFSSLKRRDDDSYNQFFQKRRWLLATPQPIRKQAIFEAAKNFKAAFTKLKNKNIDHFKMKFKTKKHQRQHGFSLGIGSHLKHDNGVLTILPRSLGQMRYFGFLPFEGKPDAECRIQRDPYGDHWLLVPVYKTTKTQISKPIVAIDPGVRTPFACFRSDGDSKCIGEDMNAKLIDIKTRVTIVDRRISKCQDGSLKRKLREHRRVLFRKHQRVRDAFHWKIINDITDECSGVLLPPFETQRVSRMLKAKTNCSMLGISHYTFRMRMKGKCEEKGLLYDEPTEEYTSKTCGVCGLINYLLGSKKTFECFCGNVCDRDVHAARNILLKWLSSEAGARVAETFLASRSS

SEQ ID NO: 4999 - protein, 645 aa, Paramecium bursaria Chlorella virus NY2A
MKCPRKMSKKPQNSLLPEELEKSSESVMPPSDDGRKRRKSKASSHLLEEDSIMSKIFSASFVLQLMTRLFLEDRSRFCMLVSLLRSREMTFKDKSISSKKNIQTLKLSQTSQVVSTGNVKASGSSWISRVPEVSNELSWRSVIDSADLHSSSSNMSSVSMAPSSKLSDLRNLLQNKNSKKTSSALSKCSAVEEMEKDDTKGRKKTKIPKNHVIATRIIKIRPTKSQKQQIDKIAGVVRFCYNASINEINKMRCHEISWPSGKLDQHLRNKFSIGKHNDIEQYISIHGNNIEPEQIIETTKMNTETRKKEPSRRYINPFFLGKLWLSECPKDFRARATFKAADAYKTSLTLWRKGLIRSFEMKFSTKRRELDRGYCFGIEKKVKFEDTGLKKRDGKLIITGIDGDIRFFEKPPINKEPVAGCELSKDSCGDYYLHVPIFRKKKERKGDNFVAIDPGGVVPWAFYASKGESGCLGTEMNERMSNVSKKISTIDKKLSGQPKGDKNSNDVIERRKLFRKKKRIRDHEHYRVINFLTDRYDGIILPKLKTKNISKALKSKANHDMFDISHYTFLRRVGERCIESDTILEHPGEQWTSKTCGRCGKSNLPGRERRGTFREYKCLYCGLHAHRDVHAARNIFMKWYIELKK

SEQ ID NO: 5000 - protein, 432 aa, Paramecium bursaria Chlorella virus NY2A
MTLKPWWTKTSQQLTHIIPWKSTNTNIFQNDANIKKVLRTRKVKLNPTKQQKLMLMKYANAARYSYNIAIAAVNDKTHKANKIELQNAFLSLKRRDDGSYNQFFQKRRWLLATPQPIRQQAIFEAAKNFKAAFTNLKNKNIDHFKMKFKTKKHQRQHGFSIGIGTHLKHNDGVLSILPRSLGQMRYFGSLPFEGKPDAECRIQRDPYGDHWLLIPVYKITKTQTTKPIVAIDPGVRTPFACFRSDGDSKCIGEDMNAKLVDIKTRVSIVDRRISKCQDVALKRKLREHRRVLFRKHQRVRDAYHWKIINDITDECSGVLLPPFETQRVSRMLKAKTNCSMLGISHYTFRMRMKDKCEEKGLLYDEPTEEYTSKTCGVCGLINYLLGSKKIFECFCGNVCDRDVHAARNILLKWLSSEAGARVAETFLASRSS

SEQ ID NO: 5001 - protein, 395 aa, Paramecium bursaria Chlorella virus NY2A
MRCHEISWPSGKLDQHLRNKFSIGKHNDIEQYISIHGNNIEPEQIIETTKMNTETRKKEPSRRYINPFFLGKLWLSECPKDFRARATFKAADAYKTSLTLWRKGLIRSFEMKFSTKRRELDRGYCFGIEKKVKFEDTGLKKRDGKLIITGIDGDIRFFEKPPINKEPVAGCELSKDSCGDYYLHVPIFRKKKERKGDNFVAIDPGGVVPWAFYASKGESGCLGTEMNERMSNVSKKISTIDKKLSGQPKGDKNSNDVIERRKLFRKKKRIRDHEHYRVINFLTDRYDGIILPKLKTKNISKALKSKANHDMFDISHYTFLRRVGERCIESDTILEHPGEQWTSKTCGRCGKSNLPGRERRGTFREYKCLYCGLHAHRDVHAARNIFMKWYIELKK

SEQ ID NO: 5002 - protein, 571 aa, Pseudalatia unipuncta granulovirus
MPLCKSCGGLDHQRRTSTKCANYLPQVRKRKLEPHQENLELQIYVVKRGLQSALCPLLSDEDRNKLLYEIRRDVRDLSRVYIELGIVMNYYMKRCDVLPDKPDVLNFFYAMKGKGPYAACYKHLAGDRVYDGKLRSFVVQELAKQYETLIHTNIETHAYSRLAKYFGVKKNNDGLFQAYYKKDFSHATEEMKQICQVINAESCKKDWWNTIPLWLKIQQELFDRDKVESFRLFPQPSYGLKHLTYTSRGWHELLRRVKPDTTPSSWMSIDDHIKELWEPWLKSTKNFGCCLQTDGISVSLSMNRWVKKVTKNGETKEVVIKKWKPSYDKLIAVDPGSRIPVAAYNSNGVYQRITSKYVKSHSLEWKRDRVRNKLTKSSEMAEAKDRERVQAACSIVLSSKNTSHVVEYTVFRLKWFNVRQQPYEIHSKLTRLKFDKYINTGKVQEKIVKQVFDGGGVEKTLVLYGAGSNFMNTAQFSGRKFKHNALLKKLRQKRNIHVEIVDESYTSQACSACNHKSGVFSKISMDHKRRRGVCPNCSSSFDRDQNAAKNILINYLRSAVCRPRCSIRRVS

SEQ ID NO: 5003 - protein, 416 aa, Cafeteria roenbergensis virus
MNIKNYHWFKNKKRKNINTDGWFNLKSINNKGFNDYDNIEKPINKFLCCKTIEIYPNLEQKNIILKWMDLFINMYNHTNYFINNNIYDFTNRKIKSNVKEILNFRKLRDNYIKNKKNETCKDEINKHMLDEAINHCVSKHKSCITNYFSKNIKFFRIRNMKKNRRKKILIIEKGLFSKKKNGFCLTKLQEIKSSESIGVNKTSILQYDKHLNKFTLFIPIEKNTTNIENRTKCGIDPGIRTFLTCYSKKEILEIGENCYEKYKNNYKKIDKTRELFDKKEINKKQFTKSINHNFDKIRNLTKDLHFKVSSYLCKKFNIITIGKISTSSIVLNTNNLNKISKRCMLSLSHFKFREILEYQCNKYNTQLNIVDESYTTKTCSNCKELNNIGSSKKYQCKSCNFKCDRDINASINIYLK

SEQ ID NO: 5004 - protein, 526 aa, Megavirus chiliensis
MFWNNQCAKLSKSLWIPSNIINLKSNKKKYFKCDNPNISFNYFTDGIKINKKIKFNDIKVTDNHDKKEKLRNKLIKTENTRYIKEQNNQKCKLNKQELNDKHKKFLDKIEIKVNQLDGFIRSRRIQILPNKKQQNIIQKWIYDTTSIYNKLVSSFNQIYDKCQKIVDNMNVENKFYHLGKIIKQNTEFPINFHKLRALKCSDFIQDYDRIPYCVIADIIKEFVSNIKSCITKISKGLITEFKFKPRKYNRIFSYIPLESHYTTVRGFYPSIFGKIKTNEKIFSWLDIKHDYKLIYDKYSNKYYIHVPKYVYRNDLTIKKPIAIMDPGARTFQTIYGLDHVVTIGDDLGSTFKKRLLKIDNLKSKLSKPGKYKHNKKLDRKTKVKKWKYKRAIDRHHKKMDHIQQELHYKTANYLCSHYDRVVVTNFSSKKVGSKKNDLDAITKRILGKLSHYRFRQRLLTKCEEYGSQYYEVDESFTSKTCCKCGNIHKTLGSSKIYDCIKCKNKIDRDVNASICILIKNKDILLK

SEQ ID NO: 5005 - protein, 493 aa, Megavirus chiliensis
MVYIKNRIPIHYPNKNCGLPNWVPSINNYYDCLNTNSWFDMNICKNPNKSSVKRHLIDAPIVPNESYKQQMKSIKRCKSNKEPVFIYTRKIRIYPTDDQKCILEEWFWAATRMYNITVKYIRDFLFKDHKLTCPFASKDILINFPFRTVLKEDRDKLMKSMKNPIVGHLLDEIIAQVVSNYKAAISNILVGNIKKFKISTWKYIREKYILKIEKNLFSNGTFCSRTFKELKSSEPLINIQHTCTLQYNRDIGKYILLVPTHKETKSYVTNDLDCGIDLGVRTFATVYSRNNVVTIGNKFKKIDSCHKKIDKINELLDSDNNKCKLRKAKRKYYRRIKDIITDMHYKSAYYLVTNYDNIHIGKLSTKGILSKNNKKISRHTKRMVGVLSPYLFRQRLNHMAHKYGATVFEVNEYLTTKTCSNCGKINELEAKKVHKCKCGMKTDRDVNAAKNILKVGYQYNSTLHQVNDIDIIETDNHIVTFNKVIKEYEVFEV

SEQ ID NO: 5006 - protein, 446 aa, unidentified
  source 1..446: note = Abalone herpesvirus Victoria/AUS/2009
MSTQTAPELSTFQVRLKPTPAQKLVLNLMIKVTNHAYNWCIHLVETKGFKPKQYDLEKVVGKTNSKDVDPDLRMPDDDWFFDNKLSRIKTRAVRQYASDYQIGLKKVKKREYASKMRVEEGKSALEITPGKNLPTEFKTELENEVNGYIAFQKECVNPMSELQIKRYKPKKPEMCLMIFNTSMKGPVLLSRPVSRLPPLDHDMKIIKRPDKKFILCIPCKQSYTRKDFSATEKTFAAIDPGIRTFATVYEPENNNFIEFGNESWFKSSKIQKIQKQIDETNALLTKVRQRGRGAAIIENYERRLKKLHFKIKKKVDGLHGKINGHIRKNYSQVAWGDMAPKQILMKDGLTHGTKRKMQMLSHGRQHEKLARIEGVTMQNEKYTSMTCSRCGYVNKKLGSASRYVCPNCEQDIGRDENASINIWRKYTGTFFRTIGGEHVYEDDVKK

SEQ ID NO: 5007 - protein, 526 aa, Acanthamoeba polyphaga
MFWNNECTKLSKSLWIPSKTINLKQNKKKYFKCDNPNITFNYFTDNTKINKKIKFNEIKISDNHNKKEKLRNKLIKTENTRYLKEQNNKKCKLNKDQLEEKHKNFLDKIELKVNQLDGFIRSRKIQLFLNNKQKNIIQQWIYDTTSIYNKLVCNFSQIYHKYQTIVNNMDVQNKSYHLGKLIKQNTEFPINFHKLRALKCNDFIQDYNRIPYCVVADIIKEFVTNVKSCITKISKGQITEFKFKYKKYNRVYSSIPLESHYTTGKGFYPSIFGEVKTNENNFSWLDVKHDYKLIYDKYSNKYYIHVPKYVYRNKPLMRKPIAIMDPGARTFQTVYGLDHFITIGDDLGSTFKKRLLKIDNLKSKLSKPGKYKFNKKLGKKTKVKKWKYKRAIDRHHKKMDHIQQELHYKTANYLCSNYDRIVVTNFSDKKIGSKKNDLGAITKRILGKLSHYKFRQRLQTKSEEYGCQYYEVDESFTSKTCCKCGNIHKTLGSSKIYDCTKCKNKIDRDMNAAICILIKNKNILLK

SEQ ID NO: 5008 - protein, 424 aa, Acanthamoeba polyphaga
MYKKNSKILRTKAKKGCIHQISKNKSGSKTTKNKNQCGGKLYNKYFCKKHKHIKPKLDLPLGFQFWRNKMIKKNNNLSESEKWLSEIPYDTRQLVIKNILANHKSAITNLKNGNIKTFDIKYKSRKNKNQFLFVDYRALKPDGKLWGRTVKTPLGMRKGEKRWFDNYMKEYELKKFGDDKGDKERKDMIITREYPGMYYLHIPYTKTITKKPIQESIISIDPGIRTFHTFYDPEGKCGKIGDNLTNHIIKLYEKIDKIQSKITKTNTKNNDLGYKKNKLCRQNMRKKCAWLRTKIKNTIRDYHWKTASFYCKSYGHVIIPKLDTDSLKKKIKKDYGLSKGSPMIRRIMALSHNEFINKLIHKSKEYNTNVLIVDEAYTSVTCGNCGIKHGKLGSNKIYKCVHCKKKIDRDINGARNILIKTLSK

SEQ ID NO: 5009 - protein, 670 aa, Pandoravirus dulcis
MASRPRRPRAADATSRRPFWFDAARTPYLARHLPHGIYTASPRSPLSDVCESGWLKADMARRAADPPPVEFRVTHPPEPSAAARDAANKAARASKRRKTAKSVKTKDVPRRIFSLRLDPTPAQKRFFQRAIGIACLAKRLAYRHLGDQRLPVTAKRINDLKKKICTEHFQTRVLTGEVSAKGKPRFHKQKADQPNTFLPEKTRRRLYEQDLRERAKVHRDTTEAAWCAERKWKRSRKTWTPPLDQRPIPAVVRCNAVIRFCQTVSTIQALVEEEGIVWDARSAASRVSPPIARSGRARVQSATSKKRKRTKEPNAPTTTAGGPPRRPRPSMGPRQVKPTDRNRTRQSFSIDATPGNANPYSARWDIVGDDRVHFMGTAVRLWGKPAKRRRELARLSARMPDGQRATGQQVIVRYESGRYHLLVQCLFAEPPKRAAEPDRAVCAVALDPGVRTFHGMYDLDGRFGEIGAGQIQQIVRIAKRAGRIRSHIDRHLQDRRPGDHNKAKRKRARKKVRAAMLKTRDLKSDAHWKTAKSLCERYDHVVIPRLPVAKMVQTLARSTSRQLMHWSHYQFRQRLQHKAAQLGVCVHVVNEAYTSMTCGRCLWIEESFRRNSSKHFECRRCGYAADRDLNAARNIMLKTIEAAVGTLEAVPPRVDVGGAAGLALAATTID

SEQ ID NO: 5010 - protein, 657 aa, Pandoravirus dulcis
MDSHAAGPSTAPAALRRPPWFDPQRTADLARRLSDQPDLALPPENVLPVGWVHMTMSRPPPSAAVPVGFEVVERPSASREEVIASSKKRRKAKRASASCNTKVDPAKTDRRVFALRIRPTTAQKRLFQRAFSIACLAKRLAYKFIGDQRDGITKTRLYAIKQAICTENIQSRERVNPDDPEDKRMRIVKRTENTTLPPATRRILFEQRLPKGDRLISSVRTNAVIQFCHAINATKALVEEKTINWDRAAQAHERYLMMREDTLVPITTPQTASASTPTAKRRPAATKRKRGNREDTDEGIRTDRYGVARMWTCRHPPRGDRPEMRPRQVKPPDRNRPRHSFSVDAHPRKTNPDSFTVRWDSKECRDNSTVVFMRQKVALWGCPSKRKRQLDRLTARMPNGEQASRTQTTLRYADGRYHLMIQCLSDKVPPRDRRPVRAVALDPGVRTFMASYDTDGRFGTVGDGQIGRIIKVAKRADRIKSHIDTRLVNQGFTNDDDNKARRKRARKRARQLNAKCRDLKADAHWKTARALCQRYDHILLPKFNSRAASQALDKTTTRQMLHWSHYEFRQRLQHKAEATGARVHLVSEHYSSMTCGRCLYIEESFRKNGSKRFECRNCGYAIDRDANGARNILIMNAERYIGRLEVSPLGSDAVAID

SEQ ID NO: 5011 - protein, 553 aa, Mimivirus terra2
FYEISNNVMAKTTNGKFWNDECEKVSDLLWKPNLIVNHKPQERINFKCDNKYITFNYYSNNVPINDQLKFKDIPQSNNTDKKNKLMDKLLKIEDSRYKKDIESNKTRKIKLTKEQLTAKHNTQLLKIQNKISQLDGFIRSRRIQLLPNDFQKHILDIWFNETTIIYNQLLTEFAQYYAKFKEIASDNKELVNLLKTNTEFPLSLQKLRNLKIHDIINIYLEDQLIHKLETPFCVIANTIKEFVANVKGNLTKLVENKIDRFTFKHKNFNRKIRTISIDSKYVSENSFYPDKLGKLMQTYEDLKGFSWQNVKHDFKIIYDKYDDKYYAHIPKYVYRNLNILNKKPIAVMDPGERTFQTLYGLDHVISIGDNLRETISKRLLRIDDLKSKLDTPGSKKHNLKLNRKTRVRKCRYKKAIDRHHKKIEHLQRELHYKTAIYLCENYQRIMVTDFSSKKVSSKDGDLDAMSKRILGKISHYRFRQRLQQKCEEFNCQYLEVNEAWTSKTCCNCGYIHAKLGTSKIYDCPKCKQKRDRDVNGAINILLKNRKLVLIEDQ

SEQ ID NO: 5012 - protein, 533 aa, Mimivirus terra2
YKEILFINNHKIIMKEAVKNVKPKVPAKKRIITGNKTKKKVFVKKKPPDKKPLKKPVKKTVKTDKPKSIYVPNKDLKISKWIPTPKKEFTEIETNSWYEHRKFENPNKSPVQTYNKIVPVVPPESIKQQNLANKRKKTNRPIVFISSEKIRIYPTKDQQKILQTWFRLFAYMYNCTIDYINSKKVVLESGRINVAATRKVCNKISVRKAQKTIRDNLIQSTNPSIMTHIIDEAIGLACSNYKTCLTNYIERHIKKFDIKPWNMSKRKKIIIIEANFFKKGTFCPTVFPKMESSKPLTMIDKTVTLQYDSDTRKYILFVPRVTPKYSVNKEKNSCGIDPGLRDFLTVYSENETQSICPIEIVVNTTKNEYKKIDKINEIIKTKPNLNSKRKKKLNRGLRKYHRRVTNKMKDMHYKVSHELVNTFDKICIGKLNVKSILSKANTVLKSALKRKLATLSFYRFTQRLTHMGYKYGTEVVNVNEYLTTKTCSNCGKIKDLGASKIYECESCGMYADRDENAAKNILKVGLKPWYKQK

SEQ ID NO: 5013 - protein, 663 aa, Mimivirus terra2
IFINSPNYIRMDDPDDPNDRPFLSCIKNSLKTITKDVNGFQQVVFDSVERTSKIVSQIYFFLKLYMIHLDNIGCDFPKINEQLIRDITNLITSKNETKGKKPSVNILLEHFYNGFFKNLLKKEDIVCRDKLKYILNYEEKDIIKNIETNIKEHYIKHLIFFLKVKFGVFKVIDRINNNKDLAKDEKKKRRAYVYHQLNCIIHDIVSKPLTQFKSRDKFHDSILFLREFLIPKKDKYVKDNIAYDVKMYPQDYLKSMFRINSLLEDINDKIISKHTDPTTNPPLYKLFNPIPLRKSFIPKYITIDTPTLIGFQITKGLSKYITKTGQSAVQKLIWSQYFKTNTKHFKRNGYTFNHIIKTDGVGVSIVFHKIDINGNKVKIPPKYVLNNMTFEAKIPYIENTIINNDLLNKEIVVCDPGKNDLGNFMKKDIDGNPVYFKYTQKERNHHTKKRKYQSIEQQLSQTVFNGKTVKEIESELCDYSSKSSDFDRFQDYVVAKLKINRLLQNHYKKFIYRKLNWNRFINRNRNEDITLNKFQNRMGTPSEVSVVFGDWSDKEGFKGREPSISKRLKRLFVKRGYKCFLINEYNTSKLCSHCHNETSSLVVNGQDIWKLKECKTCGSIHDRDHNATKNMMFIVDELLEGRQRPVIFKKPVIELNPPLICEV

SEQ ID NO: 5014 - protein, 491 aa, Mimivirus terra2
IVCYFYLILMVYNQDLSISNKTCGISDWLPPIRNKKTSDIKSNSWFDIRRCLNPNIKTKFVPVNNKQIVLKEPNCIYLKYDLITLNPSSDHIRILREWFSMYAKIYNHAINLIRKMFYVNNKLIKSKLQHEIYDEIIVRKLSNDKTKLNESLKLSDRPPEFLLDYAISHACTYCNSQVKKYLKDSKNPYNKKTLRFRLWSLHKSRRVMHIFPPKLCDKAVCNGLFLKLNPSKNIHDIYMFCVMSWDRLTGKFFVYKPVLKRLYNIPKKQFMRCGIDPGVRTFLTLYSSERTYDVCDSTFYNNKIKRMWRKIDRINFLLHNRKKRKKRKNDRRLRKSLAKYYRKIRQRIKDLHTKTAKYLVSRYKEIYIGIYDTSKNLSDPRISFYEKRRIATLNHELFLTRLQQVADRFGSSVFAINEHMTTKTCSKCGRINEIGSSKVHKCACGMYAGRDENAAKNILKKGIKEHYLSAQSDKNVTEYNNKKSNKTNKET

SEQ ID NO: 5015 - protein, 366 aa, Pandoravirus inopinatum
PGRNRRRYQDRPLWRRAHADVQTLTGGRSTEMRPRQVKPPDRNRPRQSFSIDAKTTSKTNPYTVRWDSKECREGSCVLFMRQKVALWGCPSKRKRQLDRLTARMPGGEQASRTQTTLRYADGRYHLMIQCLSDKVPLRDRRPVRAVALDPGVRTFMASYDMDGRFGAVGDGQIGRITKVAQRADRIKSHIDTQLVNQGFANGDNNKGRRKRARKRVRQLNAKCRDLKVDAHWKTAKALCQRYDHILLPKFNSRGASQVLSKTTTRQMLHWSHYEFRQRLQHKAEAMGVKVHLVSEHYSSMTCGRCLYIEESFRKNASKWFECRNCGYVIDRDSNGARNILLMNAERYIGRLEAFPLGSDTGAAAAN

SEQ ID NO: 5016 - protein, 642 aa, Tipula oleracea nudivirus
MKRLIEINKKLEKITNQKCFLSNFCKSSIVFDAINKQVIEMSNFVIEASIYCHYKLNTYLLQGKVDVLLQSSRFILDMFYELKQKSKAKYQLEPDYEFIRNDYNLNKYKVVCGNSMNFLATQYETILKNNIWMHAYSRIRKFFKNATKVDAHVYTPTVIYQTLDTLFNKKSQHSTNEYLIELLKNELQFDIGNFHDIEKYPLKYIPLFYNLQKYNELNNIKNFKLFPQITAGRKYIRYDSFALFSLLASLKLLERGHTTWYGFAPEAMNYWRKYFKVEKFETGNKKFGKSISTDGIGVSIQLVREIIHATIDDDDDETMKKKRKIKKPKVSYQQDYNNLNLDDFTRYLGIDPGERLMLGGIIKNKEGVFTPLKCKSTTFRYDTGEISRRNRLIKYTTDHDIKQYEKEHENITQTNEPYNKVSDTMQKFINDSIKAKRKKKQKPSPKNKSLLDMENINEKLKVNISYNPSNYINYTKWRLKWLLYLQQLYCKKKVARLKMEAYMRIEKTLHKYKEQLAPSNEKTLIVWGDATIAANSPVKGYIRTPKNKLLEILKQNKNCKVLMQDEFRTTKLCCKCHEPLNISTDKHRYAVCPNCHTVFNRDVNAGANILKLVITRLKKEITHKNFCRSVKLTTITGSSFIV

SEQ ID NO: 5017 - protein, 608 aa, Lambdina fiscellaria nucleopolyhedrovirus
MSSCKSCGGESHSCRSSKSCANYLPPIRQRRNSGDVVHCTQDFDVGVVKRGLDGTICPLLQEGVRQRLTAEIRSDVVELSKLYILLGVFVNHCWNAYPDDESNSVRTFQDMMNYVYAIKGKGPHAQKFDDMVRYHGDIRRYDGRLRTFIVQELVKTYWTVLKTNITTHAYSRLARYFGVKRNDPTLFAAYYHKEFGEDDNISRVCRFINVSSDWHTTIPMWIEIQRDLYTRGEQSFVVFPQPSHGLKHVTYTSRGWHELLRRVDPSNITSSWPSITDHKKELWSPYLDTSVVDMKKFGCCIQTDGVAVSISMNRPKRMPIGRNKAASMLPKSYTIDAFFEDRIVAVDPGSRVPVAACDSRTGFRRITKRWVRSHTLEWKRDRYRSRKLRRVELDEAADRQRVELDRGVQLTCRNGEQVKLYTDFRLKWFDARQRPFERTRKLTRLSFNKYIMMARTNERIVKETFLNDAPSDRVLVLYGAGVNFVNVACYSGRKFKHTDLLRRLRSKRNIRVRLVDESYTSKACSDCNELRNGTYTRLRMNHRLRRGVCPDCNADVERDYNAAKNILVYYQRFAVCRPSPSRSSGVATDTDSHSVRSLFQCAVSEFGS

SEQ ID NO: 5018 - protein, 406 aa, Kaumoebavirus
MREELGNLIKGIPNSRVLYPFCGEGTVDLNCRIKSEPDWLGDTIIRCKKVVLHLEDHQRNIIEGWFEVYRQVYNFTLKCIKGKEKVSFYDLRKEVKGKFPKGLVNLVKKSKIPANTVDGAINDVVKARKIAISNILVGNIKHFRLRPKKISKKVNTIVLESNAFSDKCDSFCTRALGKKIRSTDIIQGIDKTCRLTWKKGYINPFILHVPEDRPKLIVKNKREMCSLDPGIRTFQTLYDTERYVEIGKRAAKKLEHHLDRIHKNKEHQKEKWYKKLSNRLYDKIKHTIDDLHYKTANFLCRSYKKIFIGDMSTKGIVRTGGNLNGSTKDLTHILSHYTFRMRLIEKAEQYNSEVIVVDEAYTSKTCGGCGKINENLGGAKRFNCSCGINCDRDLNGARNIMIKGLY

SEQ ID NO: 5019 - protein, 374 aa, Kaumoebavirus
MGDTIIRSKKVVLHLEDNQRNIIEGWFEVYRQVYNFTLKCIKGKDKVSFYGLRKEVKNKFPEGLVKLIKESKIPAHTVDNAIHDVVKARKAAISNILVGNIKYFRLRPKRISKKVNTIVLEASAFSDKYESFCISVLGKKIRSTDILQGIDKDCRLTWRKGYVKPFVLYVPEDRYKVVVKNKREICSLDPGIRTFQTLYDTERYVEIGKGAAKNLEKYLDKIHKGKEHQKERWYKKLSNRLYDKIKHTIDDLHYKTANFLCRNYKKILIGNMSTKGIVRTGGNLNRSTKDLTHILSHYTFRMRLIEKAEQYNSEVIVVDEAYTSKTCGGCGKINENLGGSKIFTCSCGVNCDRDLNGARNIMLKGLYELIESNE

SEQ ID NO: 5020 - protein, 606 aa, Heliothis virescens ascovirus 3f
MQLSCKSCGGEGHSRRSSKSCANYLPPIRQRRNSGDVDHCTQDFDVGVVKQGLDGTICPLLREDVRQRLTAEIRSDVVELSKLYILLGVFVNHCWNAYPDDESNSVRTFQDMMNYVYALKGKGPHAQKFDDMVRYHGNIRRYDGRLRTFIVQEVAKTYWTVLKTNISRHAYSRLARYFGVKRNDPTLFAAYYHKEFGDDDSISRVCRFINVSSDWHSTIPMWIEIQRDMYARGEQSFVIFPQPGHGLKHVSYTSRGWHELLRRVDPSNVTSNWTSITDHKKELWVPYLDTCVVDMKKFGCCIQTDGVAVSISMNRPKIMPIRRKAALPKSYTIDAFFEDRIVAVDPGSRVPVAACDSRAGFKRITKRWVRSHTLEWKRDRYRSRKLRRVELDEAADRQRVELDRGVQITCRNGEQVKLYTDFRLKWFDARQRPFERTRKLTRLSFNKYMMTARTNERIVRETFLSDAPSDRVLVLYGAGVNFVNVACYSGRKFKHTDLLRRLRAKRNIRVRLIDESYTSKACSDCNELRNGTYTRLRMNHRLRRGVCPDCNADVERDYNAAKNILVNYQRSAICRPSPSCDSGVATDTDPHSVRSIFQCAAIEPGS

SEQ ID NO: 5021 - protein, 312 aa, Heliothis virescens ascovirus 3f
MKKFGCCIQTDGVAVSISMNRPKIMPIRRKAALPKSYTIDAFFEDRIVAVDPGSRVPVAACDSRAGFKRITKRWVRSHTLEWKRDRYRSRKLRRVELDEAADRQRVELDRGVQITCRNGEQVKLYTDFRLKWFDARQRPFERTRKLTRLSFNKYMMTARTNERIVRETFLSDAPSDRVLVLYGAGVNFVNVACYSGRKFKHTDLLRRLRAKRNIRVRLIDESYTSKACSDCNELRNGTYTRLRMNHRLRRGVCPDCNADVERDYNAAKNILVNYQRSAICRPSPSCDSGVATDTDPHSVRSIFQCAAIEPGS

SEQ ID NO: 5022 - protein, 608 aa, Heliothis virescens ascovirus 3g
MPPSCKSCGGEGHSRRSSKSCLNYLPSIRQRSNCDDVSTEDFDVGVVKRGLNGVLCPLLDEDVRRRLTAEIRSDVVELSRLYVLLGVFVNHCWNAYPDNESNGVRTFQDMMNYVYALKGKGPHAHKFDDMVRYHDGITYYNGRLRNYSVQEMAKTYWTVLKTNITTHAYSRLARYFGVKRNDPTLFAAYYHKEFGDDDISRVCRFINVSSDWHSTIPMWIEIQREMYARGEQSFIIFPQPSHGLKHVTYTSRGWHELLRRVTPSNITSNWPSITDHKKDLWAPYLDTSVVDMKKFGCCIQTDGVAVSLSINRPKSKPASRKKPISTLPKSYVTDTFNEDRIVAVDPGSRVPVAACDSRTGFKRITKRWVRSHTLEWKRDRYRSRKLRKIELDEAVDRYRIELDRGVQITCRNGHQVKLYTDFRLKWFDARQRPYERMRKLTRLSFDKYMMTARTNERIVRETFLGDTPSDRVLVLYGAGVNFVNVACYSGRKFKHTDLLRRLRSRRNIKVRLVDESYTSKACSDCNELRNGTYTRLRMNHRLRRGVCPDCNADVERDYNAAKNILINFQRSAVCRPSPSCESGVTTDKDPHSMTIRSIFQCAVSELGS

SEQ ID NO: 5023 - protein, 608 aa, Heliothis virescens ascovirus 3g
MPPSCKSCGGEGHCRRSSKSCLNYLPSIRQRSNCDDVSTEDFDVGVVKRGLNGVLCPLLDEDVRRRLTAEIRSDVVELSRLYVLLGVFVNHCWNAYPDDESNGVRTFQDMMNYVYALKGKGPHAQKFDDMVRYHDGITYYNGRLRNYSVQEMAKTYWTVLKTNITTHAYSRLARYFGVKRNDPTLFAAYYHKEFGDDDISRVCRFINVSSDWHSTIPMWIEIQREMYARGEQSFVIFPQPSHGLKHVIYTSRGWHELLRRVTPSNITSNWPSITDHKKELWAPYLDTSVVDMKKFGCCIQTDGVAVSLSMNRPKRKPALRKKPISTLPKSYVTDTFNEDRIVAVDPGSRVPVAACDSRTGFKRITKRWVRSHTLEWKRERYRSSKLRKIELDEAVDRHRIELDRGVQITCRNGHQVKLYTDFRLKWFDARQRPFERTRKLTRLSFDKYMMTARTNERIVRETFLGDTPSDRVLVLYGAGVNFVNVACYSGRKFKHTDLLRRLRTKRNIRVRLVDESYTSKACSDCNELRNGTYTRLRMNHRLRRGVCPDCNADVERDYNAAKNILVNFQRSAVCRPSPSCASGVTTERDSHSMTIRPIIQCAVSELGS

SEQ ID NO: 5024 - protein, 606 aa, Heliothis virescens ascovirus 3g
MPPSCKSCGGEGHSRRSSKSCLNYLPSIRQRSNCDDVSTEDFDVGVVKRGLNGVLCPLLDEDVRRRLTAEIRSDVVELSRLYVLLGVFVNHCWNAYPDNESNGVRTFQDMMNYVYALKGKGPHAHKFDDMVRYHDGITYYNGRLRNYSVQEMAKTYWTVLKTNITTHAYSRLARYFGVKRNDPTLFAAYYHKEFGDDDISRVCRFINVSSDWHSTIPMWIEIQREMYARGEQSFVIFPQPSHGLKHVTYTSRGWHELLRRVTPSNITSNWPSITDHKKELWAPYLDTSVVDMKKFGCCIQTDGVAVSLSMNRPKRKPALRKKPTSIPPEPYITDTFNEDRIVAVDPGSRVPVAACDSHTGFKRITKRWVRSHTLEWKRERYRSRKLRRVELDEAEDRHRVELDMGVQITCRNGHRVKLYTDFRLKWFDARQRPFERTRKLTRLSFDKYVMTARTNERIVRETFLGDTPSDRVLVLYGAGVNFVNVACYSGRKFKHTDLLRRLRSRRNIRVRLVDESYTSKACSDCNELRNGTYTRLRMNHRLRRGVCPDCNADVERDYNAAKNILVNFQRSAVCRPSPSCDSGVTTDRDSHSIRPIIQCAVIELGS

SEQ ID NO: 5025 - protein, 608 aa, Heliothis virescens ascovirus 3g
MPPSCKSCGGEGHSRRSSKSCLNYLPSIRQRSNCDDVSTEDFDVGVVKRGLNGVLCPLLDEDVRRRLTAEIRSDVVELSRLYVLLGVFVNHYWNAYPDNESNGVRTFQDMMNYVYALKGKGPHAQKFDDMVRYHDGITYYNGRLRNYSVQEMAKTYWTLLKTNITTHAYSRLARYFGVKRNDPTLFAAYYHKEFGDDDISRVCRFINVSSDWHSTIPMWIEIQREMYARGDQSFVIFPQPSHGLKHVTYTSRGWHELLRRVTPSTVTSNWPSITDHKKELWAPYLDTSVVDMKKFGCCIQTDGVAVSLSMNRSKRKPILRKKPISTLPKSYVTDTFNEDRIVAVDPGSRVPVAACDSHTGFKRITKRWVRSHTLEWKRERYRSRKLRRVELDEAVDRHRVELDMGVQITCRNGHQVKLYTDFRLKWFDARQRPFERTRKLTRLSFDKYMMTARTNERIVKDTFLGDTPSDRVLVLYGAGVNFVNVACYSGRKFKHTDLLRRLRSRRNITVRLVDESYTSKACSDCNELRNGTYTRLRMNHRLRRGVCPDCNADIERDYNAAKNILVNFQRSAVCRPSPSCDSGVTTERDPHSMTIRSIFQCAVSELGS

SEQ ID NO: 5026 - protein, 571 aa, unidentified
  source 1..571: note = Trichoplusia ni granulovirus LBIV-12
MPLCKSCGGLDHQRRTSTKCANYLPQVRKRKLEPHQENLELQIYVVKRGLQSALCPLLSDEDRNKLLYEIRRDVRDLSRVYIELGIVMNYYMKRCDVLPDKPDVLNFFYAMKGKGPYAACYKHLAGDRVYDGKLRSFVVQELAKQYETLIHTNIETHAYSRLAKYFGVKKNHEGLFQAYYKKDFSHATEEMKQICQVINAESCKKDWWNTIPLWLKIQQELFDRDKVESFRLFPQPSYGLKHLTYTSRGWHELLRRVKPDTTPSSWMSIDDHIKELWAPWLKSTKNFGCCLQTDGVSVSLSMNRWVKKVTKNGETKEVVIKKWKPSYDKLIAVDPGSRIPVAAYNSNGVYQRITSKYVKSHSLEWKRERVRSKLTKSSEQAEAKDRERVQAACSIVLSSKNTSHVVEYTVFRLKWFNVRQQPYETHLKLTRLRFDKYINTGKVQEKIVKQVFDGGGMEKTLVLYGAGSHFMNTAQFSGRKFKHNALLKKLRQKRNIHVEIVDESYTSQACSACNYKTGQFSKISMDHKRRRGVCPNCSSSFDRDQNAAKNILINYLRSAVCRPRCSIRRVS

SEQ ID NO: 5027 - protein, 409 aa, Heterosigma akashiwo virus 01
MKRRSNPKKPNSQTIYYPLSTSSVVNNWEKNVIKNLKVRIYPTPTQRKIFKEWFGTTRYVYNRVIDAVENKGEKNNAYELRNKYVTSKNNSNVNEWEKRTPMNVRTNTVLKLSSNYKSAFSNLKNGNIVRFKMRFKSKKDRSQALLLPKSSVEMKNGSMTIGKHSISKFWSSDRKGDKYAFSKFKLKGKTKKRDINIDSQCTLTYDGLYYHVLIPKKTRPKKVQKRCENTIVALDPGLRKFQTGFSQSEIFTVERTAMLKKYNKRISYLHGKFQRNNTRKILKTYRRSANIVSDIHWKLITYLTDNYEHVLIPKFESQELQKITMSKHSNRLYDTYKHYLFKQRLIEKSKEKINTRVYVVNEAYTSVTCTNYGTINAKTRSEMSTCKTCKLLSDRDIRGSRNIFIKYVQ

SEQ ID NO: 5028 - protein, 308 aa, Heterosigma akashiwo virus 01
MNVRANTVLKLSSNYKSAFSNLKNGNIVRFKMRFKSKKDRSQALFLPKSSIEMKNGSMTIGKHSISKFWSSERKGDKYAFSKFKLKGKTKKRDINIDSQCTLTYDGLYYHVLIPKKTRPKKVQKRCENTIVALDPGLRKFQTGFSQSEIFTVERTAMLKKYNKRISYLHGKFQRNNTRKILKTYRRSANIVSDIHWKLITYLTDNYEHVLIPKFESQELQKITMSKHSNRLYDTYKHYLFKQRLIEKSKEKINTRVYMVNEAYTSVTCTNCGTINAKTRSEMSTCKTCKLLSDRDIRGSRNIFIKYVQ

SEQ ID NO: 5029 - protein, 664 aa, Pandoravirus neocaledonia
MASRPSRPGADRQEPRRPFWFDAARTPYLARHLPYEPDTGSPKVSLHGHCNSGWIRAEASARSTAAPAVKFRVTHPPEPTLAEARAAAKANRASKRAKTAKAVKTKDVPRRIFSLRLDPTPAQKRFFQRAIGIACLAKRLAYKHVGDQRQPMTAKRINDLKKRICTEHFQTRVMTGETSAKGNARFQKQNAEQPNAFLPEGTRRRLYEQDLRERAKAHRGAVEAAWCARRGWKKSRKTWTPPLDHRPIPAVVRCNAVIRFCQSVSSTQALMQEQAAKWDARMAASQPRSSPSSSSSTARRTDVSSARGKRKQTEMSSASPAPRAPTNPRPCMGPRQVKATDRNRPHQTFSIDATPGNANPHAARWDFKGDDRVHLMGIAVRLWGRPAKRRRELDRLSSRMPDGERFTDQRVIVRYESGRYHLLVQCLFSEPPKRADIAGRPVSAVALDPGARTFHGTYDLDGRFGEIGAGQIRRIIRIAKKADRIKSHIDRNLKDRRPGDHNKAKRKRARRKVRAIMLKTRDLKSDAHWKVAKALCERYDHVLIPRLPVSVMVRALARSTTRQMMHWSHYEFRQRLHHKAAQLGVHVHEVSEAYTSMTCGRCLWIEESFRRNSSKQFACRRCGHTADRDLNAARNIMLKTIEASVGTLEASILQPPSTSPTSRG

SEQ ID NO: 5030 - DNA, 129 bp, Acanthamoeba polyphaga mimivirus
  source 1..129: mol_type = genomic DNA
tttaacctcctaagacccaatgtactttatataggacgctgagtgtatgcgattttagactctacgtcaaatctcttatcagctaatgatgagtataaaagcgagcaccgctcgcactaattagttact

SEQ ID NO: 5031 - RNA, 218 nt, synthetic construct
  source 1..218: mol_type = other RNA
tctaataaaatcaggggtacattccgctagtactccaccctacgggttaagcaaatgagaatatcgaaacggtatgcacaggattcttcgagtgataatcttaggatgactcactaaggagatgactaaagtgtatcattcaatattgtattgaacggtattcttccatagagagttgatttttggagtatccagaaatatcaactttttatgagcgg

SEQ ID NO: 5032 - RNA, 313 nt, synthetic construct
  source 1..313: mol_type = other RNA
ttacgaatgtgartcttgtggaatgyaygcagaycgtgatgaraatgcgccaagaatatcctaaaagtrggattaaarccttggtacaaacaaaaatartctrataaaatcaggggtacattccgctagtactccacctacgggttaagaaatgagaatatcgaaacggtayryayaggattcttcaagtrrtaatcyyaggatgactcrctaaggagatgactaaagtgtatcattcaataytyattgaacggtattcttycatagagarttgatttttggagtatccaaaatatcaactttttatgagcgg

SEQ ID NO: 5033 - DNA, 41 bp, synthetic construct
  source 1..41: mol_type = other DNA
ttcatcggggcagccacctccttgttattgggtaccgagct

SEQ ID NO: 5034 - DNA, 41 bp, synthetic construct
  source 1..41: mol_type = other DNA
agctcggtacccaataacaaggaggtggctgccccgatgaa

SEQ ID NO: 5035 - protein, 8 aa, synthetic construct
QIIGVDPC

SEQ ID NO: 5036 - protein, 20 aa, synthetic construct
VVGWGSWAFVFIIDEYKTSK

SEQ ID NO: 5037 - protein, 11 aa, synthetic construct
WNRDVSAANVI

SEQ ID NO: 5038 - protein, 8 aa, synthetic construct
LYIGIDPG

SEQ ID NO: 5039 - protein, 20 aa, synthetic construct
VIYIGGSDFARLVNEFNTSK

SEQ ID NO: 5040 - protein, 11 aa, synthetic construct
FNRDTSAAKNI

SEQ ID NO: 5041 - protein, 8 aa, synthetic construct
KLIAVDPG

SEQ ID NO: 5042 - protein, 20 aa, synthetic construct
LVLYGAGSKVEIVDESYTSQ

SEQ ID NO: 5043 - protein, 11 aa, synthetic construct
FDRDQNAAKNI

SEQ ID NO: 5044 - protein, 8 aa, synthetic construct
NCVVIDPG

SEQ ID NO: 5045 - protein, 20 aa, synthetic construct
TYIMGNWSAVFLVDEFKTSK

SEQ ID NO: 5046 - protein, 11 aa, synthetic construct
FNRDTAACLNF

SEQ ID NO: 5047 - protein, 8 aa, synthetic construct
TVIQIDPG

SEQ ID NO: 5048 - protein, 20 aa, synthetic construct
LIMFGNSQMVYEVDEYRTTK

SEQ ID NO: 5049 - protein, 11 aa, synthetic construct
TNRDINAPRNI

SEQ ID NO: 5050 - protein, 8 aa, synthetic construct
RCVLIDPG

SEQ ID NO: 5051 - protein, 20 aa, synthetic construct
VLVMGNWSAVCLIDEYATSR

SEQ ID NO: 5052 - protein, 11 aa, synthetic construct
WNRDVAAVLNF

SEQ ID NO: 5053 - protein, 8 aa, synthetic construct
KCVLIDPG

SEQ ID NO: 5054 - protein, 20 aa, synthetic construct
VLVFGDWSAVYLINEYKTSS

SEQ ID NO: 5055 - protein, 11 aa, synthetic construct
WNRDQAAVLNF

SEQ ID NO: 5056 - protein, 8 aa, synthetic construct
RIVAVDPG

SEQ ID NO: 5057 - protein, 20 aa, synthetic construct
LVLYGVGVNVQLVDESYTSK

SEQ ID NO: 5058 - protein, 11 aa, synthetic construct
VERDYNAAKNI

SEQ ID NO: 5059 - protein, 8 aa, synthetic construct
NVVVIDPN

SEQ ID NO: 5060 - protein, 20 aa, synthetic construct
TIVMGDWSDCFLLDEYKTSS

SEQ ID NO: 5061 - protein, 11 aa, synthetic construct
WNRDTLSTCNM

SEQ ID NO: 5062 - protein, 8 aa, synthetic construct
YVVGVDPG

SEQ ID NO: 5063 - protein, 19 aa, synthetic construct
IAFGDAKFFTFVDEKYTSK

SEQ ID NO: 5064 - protein, 11 aa, synthetic construct
VDRDFNASTNI

SEQ ID NO: 5065 - protein, 8 aa, synthetic construct
NSCGIDPG

SEQ ID NO: 5066 - protein, 20 aa, synthetic construct
KICIGKLNVVVNVNEYLTTK

SEQ ID NO: 5067 - protein, 11 aa, synthetic construct
ADRDENAAKNI

SEQ ID NO: 5068 - protein, 8 aa, synthetic construct
AAAAIDPG

SEQ ID NO: 5069 - protein, 20 aa, synthetic construct
TIIYPHYETVVLVDESYTSK

SEQ ID NO: 5070 - protein, 11 aa, synthetic construct
TDRDWNGARNI

SEQ ID NO: 5071 - protein, 8 aa, synthetic construct
NAVAVDPG

SEQ ID NO: 5072 - protein, 20 aa, synthetic construct
YILIPVLNFVIEVDEEFTTK

SEQ ID NO: 5073 - protein, 11 aa, synthetic construct
FDRDHNAAKNI

SEQ ID NO: 5074 - protein, 8 aa, synthetic construct
NFVAIDPG

SEQ ID NO: 5075 - protein, 20 aa, synthetic construct
GIILPKLKTLEHPGEQWTSK

SEQ ID NO: 5076 - protein, 11 aa, synthetic construct
AHRDVHAARNI

SEQ ID NO: 5077 - protein, 8 aa, synthetic construct
KAVGLDMG

SEQ ID NO: 5078 - protein, 21 aa, synthetic construct
LIGVETLNVLLGIDRFFPSSQ

SEQ ID NO: 5079 - protein, 11 aa, synthetic construct
HHRDYNASVNI

SEQ ID NO: 5080 - protein, 8 aa, synthetic construct
NKLGIDIG

SEQ ID NO: 5081 - protein, 21 aa, synthetic construct
SFCLESLKVILRADTYYPSSK

SEQ ID NO: 5082 - protein, 11 aa, synthetic construct
LDRDINAAINL

SEQ ID NO: 5083 - protein, 8 aa, synthetic construct
RQVGVDLG

SEQ ID NO: 5084 - protein, 21 aa, synthetic construct
DISIEDLNVLHVIDRWYPSSK

SEQ ID NO: 5085 - protein, 11 aa, synthetic construct
IDRDVNAAINI

SEQ ID NO: 5086 - protein, 8 aa, synthetic construct
KVVAIDVG

SEQ ID NO: 5087 - protein, 20 aa, synthetic construct
VVVMEGIHALILVNPAYTSK

SEQ ID NO: 5088 - protein, 11 aa, synthetic construct
ADRDYNASLNI

SEQ ID NO: 5089 - protein, 8 aa, synthetic construct
RAVGIDMN

SEQ ID NO: 5090 - protein, 20 aa, synthetic construct
LIVVENLKVFTKIEPQYTSK

SEQ ID NO: 5091 - protein, 11 aa, synthetic construct
EHRDINASKNI

SEQ ID NO: 5092 - protein, 8 aa, synthetic construct
GYVSVDVN

SEQ ID NO: 5093 - protein, 20 aa, synthetic construct
AIVMEKLGKVIYVDPKNTSR

SEQ ID NO: 5094 - protein, 11 aa, synthetic construct
WHRDVVAVWNL

SEQ ID NO: 5095 - protein, 8 aa, synthetic construct
FAAGVDVG

SEQ ID NO: 5096 - protein, 21 aa, synthetic construct
IIGTEHLKPVSKVSPYFPSSQ

SEQ ID NO: 5097 - protein, 11 aa, synthetic construct
HDRDENAALNI

SEQ ID NO: 5098 - protein, 8 aa, synthetic construct
AFVGVDLG

SEQ ID NO: 5099 - protein, 19 aa, synthetic construct
IALEDLTEVVFVNPAYTSS

SEQ ID NO: 5100 - protein, 11 aa, synthetic construct
ADRDVIGSWNI

SEQ ID NO: 5101 - protein, 8 aa, synthetic construct
RAMGIDIG

SEQ ID NO: 5102 - protein, 20 aa, synthetic construct
IMNIDTIVIVIMQNEDYTSK

SEQ ID NO: 5103 - protein, 11 aa, synthetic construct
IHADLQSSYNI

SEQ ID NO: 5104 - protein, 8 aa, synthetic construct
QAAAIDVG

SEQ ID NO: 5105 - protein, 19 aa, synthetic construct
TVYVGDLTVAEVTEADSSS

SEQ ID NO: 5106 - protein, 11 aa, synthetic construct
AHSDVAGAWNI

SEQ ID NO: 5107 - protein, 8 aa, synthetic construct
LKASIDLG

SEQ ID NO: 5108 - protein, 19 aa, synthetic construct
EIAIGYPKVVKVDEAWTSK

SEQ ID NO: 5109 - protein, 11 aa, synthetic construct
INADLNGAINI

SEQ ID NO: 5110 - protein, 8 aa, synthetic construct
GVIALDPG

SEQ ID NO: 5111 - protein, 20 aa, synthetic construct
IIFLPTFETVVDVTEEYTSK

SEQ ID NO: 5112 - protein, 11 aa, synthetic construct
LPRDWNGAFGI

SEQ ID NO: 5113 - protein, 8 aa, synthetic construct
AFIAFDPG

SEQ ID NO: 5114 - protein, 20 aa, synthetic construct
VIALPTYETLIRHTEEFTSK

SEQ ID NO: 5115 - protein, 11 aa, synthetic construct
LPRDWNGALGN

SEQ ID NO: 5116 - protein, 8 aa, synthetic construct
RIVALDPG

SEQ ID NO: 5117 - protein, 20 aa, synthetic construct
VILLPTFEVVIDCCEAYTSK

SEQ ID NO: 5118 - protein, 11 aa, synthetic construct
MDRDINGARGI

SEQ ID NO: 5119 - RNA, 304 nt, synthetic construct
  source 1..304: mol_type = other RNA
gccgccatggccgccggcggcggcggggccgggctgagagcctgaacggcgctagcagggcgtggggctgagggtgcacgtgttgattggcggcgagtgacgtgactagtttgttagctgcgggttagcacggactgtgcaccccaccccaccggccacgttccggatttgcggggatgcaaaggcccccaacatagaggcgtgtgcttagtaggcgcccgcgtcaaggtggctgggttgataacgacccgggaggggagggctcagcccttttcctgcctccctaaggcagccacctccttgt

SEQ ID NO: 5120 - RNA, 353 nt, synthetic construct
  source 1..353: mol_type = other RNA
cgtgatccgtgtgctcctcctgctgaagctgatgggcttcgagcggccraycaagctgcagcggccgccatggccgccgcggcggcggggccgggctgagagcctgaacggcgctagcagggcgtggggctgagggtgcacgtgtygattggcggcgagtgacgtgactagtttgttagctgcgggttagcacggactgtgcaccccacccaaccggccaygtccggatttgcggggatgccaaaggcccccaacatagaggcgtgtgcttagtaggcgcccgcgtcaaggtggcgggttrataaygacccgggatcagcccttttcctgccataaggcagccacctycttgt

SEQ ID NO: 5121 - DNA, 32 bp, synthetic construct
  source 1..32: mol_type = other DNA
ggggcagccacctccttgttattgggtaccga

SEQ ID NO: 5122 - DNA, 28 bp, synthetic construct
  source 1..28: mol_type = other DNA
ggggcagccacctccttgtgggtaccga

SEQ ID NO: 5123 - DNA, 30 bp, synthetic construct
  source 1..30: mol_type = other DNA
ggggcagccacctccttgtttgggtaccga

SEQ ID NO: 5124 - DNA, 24 bp, synthetic construct
  source 1..24: mol_type = other DNA
ggggcagccacctccttgttacga

SEQ ID NO: 5125 - DNA, 29 bp, synthetic construct
  source 1..29: mol_type = other DNA
ggggcagccacctccttgttaggtaccga

SEQ ID NO: 5126 - DNA, 30 bp, synthetic construct
  source 1..30: mol_type = other DNA
ggggcagccacctccttgttattgtaccga

SEQ ID NO: 5127 - DNA, 30 bp, synthetic construct; identical to SEQ ID NO: 5126
  source 1..30: mol_type = other DNA

SEQ ID NO: 5128 - DNA, 31 bp, synthetic construct
  source 1..31: mol_type = other DNA
ggggcagccacctccttgttattggtaccga

SEQ ID NO: 5129 - protein, 13 aa, synthetic construct
SCGIDPGLRDFLT

SEQ ID NO: 5130 - protein, 36 aa, synthetic construct
RKLATLSFYRFTQRLTHMGYKYGTEVVNVNEYLTTK

SEQ ID NO: 5131 - protein, 25 aa, synthetic construct
ECESCGMYADRDENAAKNILKVGLK

SEQ ID NO: 5132 - protein, 13 aa, synthetic construct
SCGIDPGLRDFLT

SEQ ID NO: 5133 - protein, 36 aa, synthetic construct; identical to SEQ ID NO: 5130

SEQ ID NO: 5134 - protein, 25 aa, synthetic construct
ECESCGMYADRDENAAKNILKVGLK

SEQ ID NO: 5135 - protein, 13 aa, synthetic construct
SCGIDPGLRDFLT

SEQ ID NO: 5136 - protein, 36 aa, synthetic construct; identical to SEQ ID NO: 5130

SEQ ID NO: 5137 - protein, 25 aa, synthetic construct
ECESCGMYADRDENAAKNILKVGLK

SEQ ID NO: 5138 - protein, 13 aa, synthetic construct
SCGIDPGLRDFLT

SEQ ID NO: 5139 - protein, 36 aa, synthetic construct; identical to SEQ ID NO: 5130

SEQ ID NO: 5140 - protein, 25 aa, synthetic construct
ECESCGMYADRDENAAKNILKVGLK

SEQ ID NO: 5141 - protein, 13 aa, synthetic construct
VIALDPGVRTFMT

SEQ ID NO: 5142 - protein, 36 aa, synthetic construct
RAMLTWAHYRFKLTLRHQAEITGTTVVDVTEEYTSK

SEQ ID NO: 5143 - protein, 25 aa, synthetic construct
RCPECGFTLPRDWNGAFGIFLKALR

SEQ ID NO: 5144 - protein, 13 aa, synthetic construct
AMGIDIGVRNLVT

SEQ ID NO: 5145 - protein, 36 aa, synthetic construct
QNFVQLPFNMLIYQIKYKAEEIGITVIMQNEDYTSK

SEQ ID NO: 5146 - protein, 24 aa, synthetic construct
RSATGKLIHADLQSSYNIIKKAIP

SEQ ID NO: 5147 - protein, 13 aa, synthetic construct
LCKWIDFTRDFLS

SEQ ID NO: 5148 - protein, 39 aa, synthetic construct
EKVGGVLNPYQLTDQFTSFAKMGTQSGFLFYVPAPYTSK

SEQ ID NO: 5149 - protein, 25 aa, synthetic construct
RFQNPEWPMDADANGAYHIALKGQL

SEQ ID NO: 5150 - DNA, 51 bp, synthetic construct
  source 1..51: mol_type = other DNA
gccaagcttatctgacgcagccacctccttgttattgggtaccgagctcga

SEQ ID NO: 5151 - DNA, 51 bp, synthetic construct
  source 1..51: mol_type = other DNA
tcgagctcggtacccaataacaaggaggtggctgcgtcagataagcttggc

SEQ ID NO: 5152 - RNA, 226 nt, synthetic construct
  source 1..226: mol_type = other RNA
aaaaatagtctaataaaatcaggggtacattccgctagtactccaccctacgggttaagcaaatgagaatatcgaaacggtatgcacaggattcttcgagtgataatcttaggatgactcactaaggagatgactaaagtgtatcattcaatattgtattgaacggtattcttccatagagagttgatttttggagtatccagaaatatcaactttttatgagcgg

SEQ ID NO: 5153 - DNA, 41 bp, synthetic construct; identical to SEQ ID NO: 5033
  source 1..41: mol_type = other DNA

SEQ ID NO: 5154 - DNA, 41 bp, synthetic construct; identical to SEQ ID NO: 5034
  source 1..41: mol_type = other DNA

SEQ ID NO: 5155 - protein, 8 aa, synthetic construct
QIIGVDPC

SEQ ID NO: 5156 - protein, 20 aa, synthetic construct
VVGWGSWAFVFIIDEYKTSK

SEQ ID NO: 5157 - protein, 11 aa, synthetic construct
WNRDVSAANVI

SEQ ID NO: 5158 - protein, 8 aa, synthetic construct
LYIGIDPG

SEQ ID NO: 5159 - protein, 20 aa, synthetic construct
VIYIGGSDFARLVNEFNTSK

SEQ ID NO: 5160 - protein, 11 aa, synthetic construct
FNRDTSAAKNI

SEQ ID NO: 5161 - protein, 8 aa, synthetic construct
KLIAVDPG

SEQ ID NO: 5162 - protein, 20 aa, synthetic construct
LVLYGAGSKVEIVDESYTSQ

SEQ ID NO: 5163 - protein, 11 aa, synthetic construct
FDRDQNAAKNI

SEQ ID NO: 5164 - protein, 8 aa, synthetic construct
NCVVIDPG

SEQ ID NO: 5165 - protein, 20 aa, synthetic construct
TYIMGNWSAVFLVDEFKTSK

SEQ ID NO: 5166 - protein, 11 aa, synthetic construct
FNRDTAACLNF

SEQ ID NO: 5167 - protein, 8 aa, synthetic construct
TVIQIDPG

SEQ ID NO: 5168 - protein, 20 aa, synthetic construct
LIMFGNSQMVYEVDEYRTTK

SEQ ID NO: 5169 - protein, 11 aa, synthetic construct
TNRDINAPRNI

SEQ ID NO: 5170 - protein, 8 aa, synthetic construct
RCVLIDPG

SEQ ID NO: 5171 - protein, 20 aa, synthetic construct
VLVMGNWSAVCLIDEYATSR

SEQ ID NO: 5172 - protein, 11 aa, synthetic construct
WNRDVAAVLNF

SEQ ID NO: 5173 - protein, 8 aa, synthetic construct
KCVLIDPG

SEQ ID NO: 5174 - protein, 20 aa, synthetic construct
VLVFGDWSAVYLINEYKTSS

SEQ ID NO: 5175 - protein, 11 aa, synthetic construct
WNRDQAAVLNF

SEQ ID NO: 5176 - protein, 8 aa, synthetic construct
RIVAVDPG

SEQ ID NO: 5177 - protein, 20 aa, synthetic construct
LVLYGVGVNVQLVDESYTSK

SEQ ID NO: 5178 - protein, 11 aa, synthetic construct
VERDYNAAKNI

SEQ ID NO: 5179 - protein, 8 aa, synthetic construct
NVVVIDPN

SEQ ID NO: 5180 - protein, 20 aa, synthetic construct
TIVMGDWSDCFLLDEYKTSS

SEQ ID NO: 5181 - protein, 11 aa, synthetic construct
WNRDTLSTCNM

SEQ ID NO: 5182 - protein, 8 aa, synthetic construct
YVVGVDPG

SEQ ID NO: 5183 - protein, 19 aa, synthetic construct
IAFGDAKFFTFVDEKYTSK

SEQ ID NO: 5184 - protein, 11 aa, synthetic construct
VDRDFNASTNI

SEQ ID NO: 5185 - protein, 8 aa, synthetic construct
NSCGIDPG

SEQ ID NO: 5186 - protein, 20 aa, synthetic construct
KICIGKLNVVVNVNEYLTTK

SEQ ID NO: 5187 - protein, 11 aa, synthetic construct
ADRDENAAKNI

SEQ ID NO: 5188 - protein, 8 aa, synthetic construct
AAAAIDPG

SEQ ID NO: 5189 - protein, 20 aa, synthetic construct
TIIYPHYETVVLVDESYTSK

SEQ ID NO: 5190 - protein, 11 aa, synthetic construct
TDRDWNGARNI

SEQ ID NO: 5191 - protein, 8 aa, synthetic construct
NAVAVDPG

SEQ ID NO: 5192 - protein, 20 aa, synthetic construct
YILIPVLNFVIEVDEEFTTK

SEQ ID NO: 5193 - protein, 11 aa, synthetic construct
FDRDHNAAKNI

SEQ ID NO: 5194 - protein, 8 aa, synthetic construct
NFVAIDPG

SEQ ID NO: 5195 - protein, 20 aa, synthetic construct
GIILPKLKTLEHPGEQWTSK

SEQ ID NO: 5196 - protein, 11 aa, synthetic construct
AHRDVHAARNI

SEQ ID NO: 5197 - protein, 8 aa, synthetic construct
KAVGLDMG

SEQ ID NO: 5198 - protein, 21 aa, synthetic construct
LIGVETLNVLLGIDRFFPSSQ

SEQ ID NO: 5199 - protein, 11 aa, synthetic construct
HHRDYNASVNI

SEQ ID NO: 5200 - protein, 8 aa, synthetic construct
NKLGIDIG

SEQ ID NO: 5201 - protein, 21 aa, synthetic construct
SFCLESLKVILRADTYYPSSK

SEQ ID NO: 5202 - protein, 11 aa, synthetic construct
LDRDINAAINL

SEQ ID NO: 5203 - protein, 8 aa, synthetic construct
RQVGVDLG

SEQ ID NO: 5204 - protein, 21 aa, synthetic construct
DISIEDLNVLHVIDRWYPSSK

SEQ ID NO: 5205 - protein, 11 aa, synthetic construct
IDRDVNAAINI

SEQ ID NO: 5206 - protein, 8 aa, synthetic construct
KVVAIDVG

SEQ ID NO: 5207 - protein, 20 aa, synthetic construct
VVVMEGIHALILVNPAYTSK

SEQ ID NO: 5208 - protein, 11 aa, synthetic construct
ADRDYNASLNI

SEQ ID NO: 5209 - protein, 8 aa, synthetic construct
RAVGIDMN

SEQ ID NO: 5210 - protein, 20 aa, synthetic construct
LIVVENLKVFTKIEPQYTSK

SEQ ID NO: 5211 - protein, 11 aa, synthetic construct
EHRDINASKNI

SEQ ID NO: 5212 - protein, 8 aa, synthetic construct
GYVSVDVN

SEQ ID NO: 5213 - protein, 20 aa, synthetic construct
AIVMEKLGKVIYVDPKNTSR

SEQ ID NO: 5214 - protein, 11 aa, synthetic construct
WHRDVVAVWNL

SEQ ID NO: 5215 - protein, 8 aa, synthetic construct
FAAGVDVG

SEQ ID NO: 5216 - protein, 21 aa, synthetic construct
IIGTEHLKPVSKVSPYFPSSQ

SEQ ID NO: 5217 - protein, 11 aa, synthetic construct
HDRDENAALNI

SEQ ID NO: 5218 - protein, 8 aa, synthetic construct
AFVGVDLG

SEQ ID NO: 5219 - protein, 19 aa, synthetic construct
IALEDLTEVVFVNPAYTSS

SEQ ID NO: 5220 - protein, 11 aa, synthetic construct
ADRDVIGSWNI

SEQ ID NO: 5221 - protein, 8 aa, synthetic construct
RAMGIDIG

SEQ ID NO: 5222 - protein, 20 aa, synthetic construct
IMNIDTIVIVIMQNEDYTSK

SEQ ID NO: 5223 - protein, 11 aa, synthetic construct
IHADLQSSYNI

SEQ ID NO: 5224 - protein, 8 aa, synthetic construct
QAAAIDVG

SEQ ID NO: 5225 - protein, 19 aa, synthetic construct
TVYVGDLTVAEVTEADSSS

SEQ ID NO: 5226 - protein, 11 aa, synthetic construct
AHSDVAGAWNI

SEQ ID NO: 5227 - protein, 8 aa, synthetic construct
LKASIDLG

SEQ ID NO: 5228 - protein, 19 aa, synthetic construct
EIAIGYPKVVKVDEAWTSK

SEQ ID NO: 5229 - protein, 11 aa, synthetic construct
INADLNGAINI

SEQ ID NO: 5230 - protein, 8 aa, synthetic construct
GVIALDPG

SEQ ID NO: 5231 - protein, 20 aa, synthetic construct
IIFLPTFETVVDVTEEYTSK

SEQ ID NO: 5232 - protein, 11 aa, synthetic construct
LPRDWNGAFGI

SEQ ID NO: 5233 - protein, 8 aa, synthetic construct
AFIAFDPG

SEQ ID NO: 5234 - protein, 20 aa, synthetic construct
VIALPTYETLIRHTEEFTSK

SEQ ID NO: 5235 - protein, 11 aa, synthetic construct
LPRDWNGALGN

SEQ ID NO: 5236 - protein, 8 aa, synthetic construct
RIVALDPG

SEQ ID NO: 5237 - protein, 20 aa, synthetic construct
VILLPTFEVVIDCCEAYTSK

SEQ ID NO: 5238 - protein, 11 aa, synthetic construct
MDRDINGARGI

SEQ ID NO: 5239 - DNA, 86 bp, synthetic construct
  source 1..86: mol_type = other DNA
ttagtttttgtgaagtttaattgacttatttatataaattttttttgtttcatattgatgtgtgtctaggcaggacctgtggccaa

SEQ ID NO: 5240 - DNA, 56 bp, synthetic construct
  source 1..56: mol_type = other DNA
ttagtttttgtgaagtttaattgacttatttgtgtctaggcaggacctgtggccaa

SEQ ID NO: 5241 - DNA, 46 bp, synthetic construct
  source 1..46: mol_type = other DNA
ttagtttttgtgaagtttaatgtgtctaggcaggacctgtggccaa

SEQ ID NO: 5242 - DNA, 49 bp, synthetic construct
  source 1..49: mol_type = other DNA
ttagtttttgtgaagtttaattgtgtgtctaggcaggacctgtggccaa

SEQ ID NO: 5243 - DNA, 54 bp, synthetic construct
  source 1..54: mol_type = other DNA
ttagtttttgtgaagtttaattgacttatgtgtctaggcaggacctgtggccaa

SEQ ID NO: 5244 - DNA, 52 bp, synthetic construct
  source 1..52: mol_type = other DNA
ttagtttttgtgaagtttaattgacttgtgtctaggcaggacctgtggccaa

SEQ ID NO: 5245 - DNA, 52 bp, synthetic construct
  source 1..52: mol_type = other DNA
ttagtttttgtgaagtttaattgacgtgtgtctaggcaggacctgtggccaa

SEQ ID NO: 5246 - DNA, 58 bp, synthetic construct
  source 1..58: mol_type = other DNA
ttagtttttgtgaagtttaattgacttatcattgtgtctaggcaggacctgtggccaa

SEQ ID NO: 5247 - DNA, 59 bp, synthetic construct
  source 1..59: mol_type = other DNA
ttagtttttgtgaagtttaattgacttatttattgtgtctaggcaggacctgtggccaa

SEQ ID NO: 5248 - DNA, 60 bp, synthetic construct
  source 1..60: mol_type = other DNA
ttagtttttgtgaagtttaattgacatattgatgtgtgtctaggcaggacctgtggccaa

SEQ ID NO: 5249 - DNA, 61 bp, synthetic construct
  source 1..61: mol_type = other DNA
ttagtttttgtgaagtttaattgacttaatcaatatgtgtctaggcaggacctgtggccaa

SEQ ID NO: 5250 - DNA, 61 bp, synthetic construct
  source 1..61: mol_type = other DNA
ttagtttttgtgaagtttaattgactttattgatgtgtgtctaggcaggacctgtggccaa

SEQ ID NO: 5251 - DNA, 61 bp, synthetic construct
  source 1..61: mol_type = other DNA
ttagtttttgtgaagtttaattgacttatttataatgtgtctaggcaggacctgtggccaa

SEQ ID NO: 5252 - DNA, 62 bp, synthetic construct
  source 1..62: mol_type = other DNA
ttagtttttgtgaagtttaatagtttcatattgatgtgtgtctaggcaggacctgtggccaa

SEQ ID NO: 5253 - DNA, 62 bp, synthetic construct
  source 1..62: mol_type = other DNA
ttagtttttgtgaagtttaattgacttatattgatgtgtgtctaggcaggacctgtggccaa

SEQ ID NO: 5254 - DNA, 62 bp, synthetic construct
  source 1..62: mol_type = other DNA
ttagtttttgtgaagtttaattgacttatcatattgtgtgtctaggcaggacctgtggccaa

SEQ ID NO: 5255 - DNA, 62 bp, synthetic construct
  source 1..62: mol_type = other DNA
ttagtttttgtgaagtttaatagtttcatattgttgtgtgtctaggcaggacctgtggccaa

SEQ ID NO: 5256 - DNA, 63 bp, synthetic construct
  source 1..63: mol_type = other DNA
ttagtttttgtgaagtttaattgacttattcataatgtgtgtctaggcaggacctgtggccaa

SEQ ID NO: 5257 - DNA, 63 bp, synthetic construct
  source 1..63: mol_type = other DNA
ttagtttttgtgaagtttaatttgtttcatattgatgtgtgtctaggcaggacctgtggccaa

SEQ ID NO: 5258 - DNA, 68 bp, synthetic construct
  source 1..68: mol_type = other DNA
ttagtttttgtgaagtttaattgacttatttacatattgatgtgtgtctaggcaggacctgtggccaa

SEQ ID NO: 5259 - DNA, 81 bp, synthetic construct
  source 1..81: mol_type = other DNA
tatgaaattgcctttttattatatgtcaataatggttatttcatatgattggcaatttcgtatgattgaatatcaatagtc

SEQ ID NO: 5260 - DNA, 66 bp, synthetic construct
  source 1..66: mol_type = other DNA
tatgaaattgcctttttattatatgtcatatgattggcaatttcgtatgattgaatatcaatagtc

SEQ ID NO: 5261 - DNA, 66 bp, synthetic construct
  source 1..66: mol_type = other DNA
tatgaaattgcctttttattatatgtcaattcattggcaatttcgtatgattgaatatcaatagtc

SEQ ID NO: 5262 - DNA, 71 bp, synthetic construct
  source 1..71: mol_type = other DNA
tatgaaattgcctttttattatatgtcaatacatatgattggcaatttcgtatgattgaatatcaatagtc

SEQ ID NO: 5263 - DNA, 71 bp, synthetic construct
  source 1..71: mol_type = other DNA
tatgaaattgcctttttattatatgtcaattcatatgattggcaatttcgtatgattgaatatcaatagtc

SEQ ID NO: 5264 - DNA, 72 bp, synthetic construct
  source 1..72: mol_type = other DNA
tatgaaattgcctttttattatatgtcaataacatatgattggcaatttcgtatgattgaatatcaatagtc

SEQ ID NO: 5265 - DNA, 73 bp, synthetic construct
  source 1..73: mol_type = other DNA
tatgaaattgcctttttattatatgtcaataatcatatgattggcaatttcgtatgattgaatatcaatagtc

SEQ ID NO: 5266 - DNA, 73 bp, synthetic construct
  source 1..73: mol_type = other DNA
tatgaaattgcctttttattatatgtcaataatggttagattggcaatttcgtatgattgaatatcaatagtc

SEQ ID NO: 5267 - DNA, 74 bp, synthetic construct
  source 1..74: mol_type = other DNA
tatgaaattgcctttttattatatgtcaataatgcatatgattggcaatttcgtatgattgaatatcaatagtc

SEQ ID NO: 5268 - DNA, 76 bp, synthetic construct
  source 1..76: mol_type = other DNA
tatgaaattgcctttttattatatgtcaataaatttcatatgattggcaatttcgtatgattgaatatcaatagtc

SEQ ID NO: 5269 - DNA, 76 bp, synthetic construct
  source 1..76: mol_type = other DNA
tatgaaattgcctttttattatatgtcaataaatgtcatatgattggcaatttcgtatgattgaatatcaatagtc

SEQ ID NO: 5270 - DNA, 77 bp, synthetic construct
  source 1..77: mol_type = other DNA
tatgaaattgcctttttattatatgtcaataaattttcatatgattggcaatttcgtatgattgaatatcaatagtc

SEQ ID NO: 5271 - DNA, 77 bp, synthetic construct
  source 1..77: mol_type = other DNA
tatgaaattgcctttttattatatgtcaataaatgttcatatgattggcaatttcgtatgattgaatatcaatagtc

SEQ ID NO: 5272 - DNA, 77 bp, synthetic construct
  source 1..77: mol_type = other DNA
tatgaaattgcctttttattatatgtcaataaatggtcatatgattggcaatttcgtatgattgaatatcaatagtc

SEQ ID NO: 5273 - DNA, 77 bp, synthetic construct
  source 1..77: mol_type = other DNA
tatgaaattgcctttttattatatgtcaataaatggttaaatgattggcaatttcgtatgattgaatatcaatagtc

SEQ ID NO: 5274 - DNA, 77 bp, synthetic construct
  source 1..77: mol_type = other DNA
tatgaaattgcctttttattatatgtcaataaatggttatatgattggcaatttcgtatgattgaatatcaatagtc

SEQ ID NO: 5275 - DNA, 78 bp, synthetic construct
  source 1..78: mol_type = other DNA
tatgaaattgcctttttattatatgtcaataaatggttcatatgattggcaatttcgtatgattgaatatcaatagtc

SEQ ID NO: 5276 - DNA, 78 bp, synthetic construct
  source 1..78: mol_type = other DNA
tatgaaattgcctttttattatatgtcaataaatgtttcatatgattggcaatttcgtatgattgaatatcaatagtc

SEQ ID NO: 5277 - DNA, 77 bp, synthetic construct
  source 1..77: mol_type = other DNA
tatgaaattgcctttttattatatgtaaataatggttcatatgattggcaatttcgtatgattgaatatcaatagtc

SEQ ID NO: 5278 - DNA, 77 bp, synthetic construct
  source 1..77: mol_type = other DNA
tatgaaattgcctttttattatatgtcaataatggaacatatgattggcaatttcgtatgattgaatatcaatagtc

SEQ ID NO: 5279 - protein, 627 aa, synthetic construct
MEGLLSEFRGLFEPLRVKRPPPKDPPDHPKTEEELTGREDFLYNVKARLNDVLQIEAGCRKVDFHLRKRRGEIWSEVNERQQSIKSSKTKEGFLKQRHLLQEIPVPPWFDEGIEMSKKDASNLVRDVRNTRRDMWKSMKEPGTEHPPKAFSLMPHFSLTRAFVRYDSQSIGTLAKSLDFPGVSENQVTLKTTGVKCAGRAERLWWTGIFDFYSERIVNRRPSTEKNQTQRTRKVLRLNNRYRKGIGVCNKDPWFTDEVLYSAKRDDPSCETPWIVNSISTDGLQVKVCLATLAKTNPLPKGVKELVKKGYASIQDKLRVSKSSKGVFKEAFPLYDTEKSRLSSPDNHIEVVGLDPGQVSVYATVRANITSPETFKASDFKGSQSSISSREYKHQSLTRFSARAEVGRRLDHVEYGQAVQAFDSVSLKQPDSSVAYSSVIYCTLRVRVVELLSEERRLQKFARLRARQRTVDGMARDIAFGNTYRQEVRKEQRSSAEPLSPERRKELLKKIRDKRRVVFFGNGQFGHGARGACPRKALIRALGVLCPVVLVDEFRTSKCCCSCGVPLKQVDGSRVFRCSSQMDEGRSCPVRYIDRDANGSANIGVCGVFQLLGFKRPSFLCRKSSEGK

SEQ ID NO: 5280 - protein, 601 aa, synthetic construct
MMYDDPIPPDPGDIPKKRTRPDVAERKARNKLLDFTCISVKWNTLCKNDILRSNIEEYVLNINKVGLEAYHIANLHILRCLSNNITLPSIEQTFFYRCCAGVVEKKGERSSTPNTGDSDLDATLVMYKRLRPETNYTIPTKENMADKISYLARDMNTVSHNHLIFNFEKRLMKYVRLKYKKGTKDAWQFINHAFKTDSDRSDDQVEFANWLVYPPYESSIKLHFNHFLQKSYDILRFMEEQPKNTKGARSFTILPLKRGFVFSHITLGGSCLQQILRNIMKKHKGVTFVGYKKLNLDTFNENKDEIWRSLFNIDRYETSNRKFSYEISTNGYSATIKMERLKSILPEVHISAKLCENDYDCFIGADPGVDYVLTAHTSTGKFVQISTAEYRHMAQMRKQLHWNNNVRSRNPEYAKIIKDMPSFMTTNVDTYMDRLSYVLKNCDYLFSFSASKGFRKWRFKTYIHSRSALTKLCKRLTGGEKRCCVGVGDWSRQDGMIKRHPTAPVKRIQKELQRHAKVVSIDEYGTSRSCSCCGNRCTKIKLPKQTKEGNLELSRCHQVVRCSSNECAMCWQRDINSSINHLKLLMCLVRGEDRPDYMRRS

SEQ ID NO: 5281 - protein, 671 aa, synthetic construct
MEEPRVRPPPKRFKKWRERNALLFDDIPESECYGFEHFFDHRRYEPLRLLLQHCAEIPVEATAGDDPYLDFLCKEPGTRPDVQRRKEANKALNFSVVKTTYNSWLRPAARGCLNIDRLVRNMNKMSLEAHSFANLHILRLLEADQPLPKLDKAWFYTCCAAVSANSNQQQQLKDPAMRETKVVYDSCKPPGYRRPSSDFVTALMSNLSGQMETEIKNLMVATLYSRLKRYLRHFGELSGEEAFEILDALFKPEDDSRHPYVLHLRSLFPTLPTANALQADPRIAIPAMHTMLRHFEGAEPDRRTRLFSMLPTKRGFRAAHITICSSALRDLLLSADIRDDDFMERKRHYWSALFEVEKFERGGRTFGCQMQLDGKAVSILMTKPKTRPPVPEQHDHKKKKKLKKSEDPAYDCKELRLDSYDRVLGLDPGRRDLFVAVDRDGDVTRCSAKRFYHEAGYTRTQRTMKTWLDRDPEIKGWLQSATSAKTSSVHRFKEHLRCLLPRVDRLLGFHHDKKFRDKRFTRYCGSRRVMHRLCKEIMGASGRKTLVGFGDWSNQDAGGLIKKSPSGPVLGLRRELSKRCTVRLVDEFRTSKLCQWCHGCTRNMRRKLSAPTTPGRSSGSFTHTQVHAVLHCGTNGCRGTTMNRDVNGASNILQCFLSVIRTGGRPAGFQR

SEQ ID NO: 5282 - protein, 350 aa, synthetic construct
MNIKTLRQMLINKDINILEPHEQWLKEYNYDLKSEALRDLVKNYSSNMARYKSTGTPFKLKFKSEKAKTQSLSVLKKYWNNKKSFYSDVFSSTKMRSAEKLPEQLLMDSRLQRTRHNHFYLIVPMVGEEIARDEGREKFIFIDPGVRTFLTGYDSGQNVVEIGKNAVVRTEKLKHRRRKLQSKLAKLKTHKKRQNHRKALHRLDEKISRILSDMHKKSALCLCKSYETVFIPKLNFHQCTKLNRKSRSSMATMAHCSFNDRVVMKAEQLRGTSVIVVEEDYTSKTCSKCGNIKKDLGSNKIYSCVSCFSVFDRDFNAAKNIMLKYCCEHLMTSDASSVPLPLVERVRGSP

SEQ ID NO: 5283 - protein, 457 aa, synthetic construct; identical to SEQ ID NO: 3099

SEQ ID NO: 5284 - protein, 420 aa, synthetic construct
VSKTGAHSWFSTRQVSVQNQKWLRTSSLSSTASVPDYTDGVNTKLRSKKIRIYPSPELNQVWRKWLAACRYCYNQAIALSRSGKRLSKLKLRNKVMPSDLPEWVKETPCHIRQNAIFDAYQALTASPDARFRSCRDSSQGIKFNNTNFSSGSWYPRLTKGLTFMVSEPIPKTCGQGTQLVFTKGRWLAIFPEPVAVTPTDATGVIALDPGVRTFMTGFDGSRFLELGSGDIGRITRLCQHLDDLMSRIAKEPCRSRRRRMRQAAQRMRTKIRNLVDEAHKQIAHYLTHNYSIIFLPTFETSDMVAKVKRLIRSKTARAMLTWAHYRFKLTLRHQAEITGTTVVDVTEEYTSKTCTHCGQMHSQLGGSKVFRCPECGFTLPRDWNGAFGIFLKALRDTASVTLTGNSAIVALSGNSRINVA

SEQ ID NO: 5285 - protein, 448 aa, synthetic construct
MLPTPEQTRELKRAFSASRRAYNWALDRVKNHGEKPNNIALRNAYRKEPPPHWAAGKQAVASRIVAGGVKQLADAYASNFAKQKKDSSHSFEVKFRSTRRNPNEAIKIDKDTANDKQSPLNRFAPMPHPYPKRFAEQRRHGRTECRAFLGNNFSGVGGIVLQDKPRVIERLLGEGNRLKEDAKVLWDRRTGHFHFVYTFEQPKLADPDPTFASKRVLATDPGVRVFQTWYSPTSGAYGTLNAGFQQQIEPRIHALDALQSRVDRRYDVHRDAKGKVTSKTLKAPPRNRTKKQYHATTRTLKRKLARDRRRHVGWIESAHYDAANFVLRDHDVIIQPWLHSARLTQRSTRVIRSKVARNMLTMSHFKYRQRLQWASTRYAGRHVLVTEEPGTSKTCTLCGHWHAALGSAELFACPKCDLRIGRDLNGAIGNYYAAYGEAVGVGWDRQSG

SEQ ID NO: 5286 - protein, 457 aa, synthetic construct
MGLGSWYSVRMSVPKVVKPENLRKTYSQSSRYLWQNIMECVLPPIIEEDEKLPKPKKNKSSKIPAGKTQRIRLFPTQEEKSKLKRWMGTARWTYNRCLVAVEKEGIERTKKALRAQCLNAANFNNTELQWVLETPYDIRDEAMNDLLKSYSSNFAAKRTKRKMKFRSKKDRQQSIAILSKHWGKSKGVYTFLCKMKSAENLPAELHYDARLVMNRLGEFYLCIPQLLEIWTENQGPTQSDAVIALDPGVRTFITGYDPSGQAVEWGKNDISRIYRLSHIYDKIQSKHDSIHGKVHKRKRYKLRRVMLRIHKKIRCLINDCHHKLAKWLCQSYRIILLPEFKTQGMVRRGKRRIRSKTARMMLTWSHFRFRQYLLHKVREYPWCRVIICTEEYTSKTCGCCGHIHRKLGGSKVFRCPSCTAELDRDINGARNILLRYLTVTSKEPVYAGAGTYPLGPS

SEQ ID NO: 5287 - RNA, 313 nt, synthetic construct
  source 1..313: mol_type = other RNA
ttacgaatgtgartcttgtggaatgyaygcagaycgtgatgaraatgcgccaagaatatcctaaaagtaggattaaarccttggtacaaacaaaaatartctrataaaatcaggggtacattccgctagtactccacctacgggttaagaaatgagaatatcgaaacggtayryayaggattcttcaagtrrtaatcyyaggatgactcrctaaggagatgactaaagtgtatcattcaataytyattgaacggtattcttycatagagarttgatttttggagtatccaaaatatcaactttttatgagcgg

SEQ ID NO: 5288 - RNA, 157 nt, synthetic construct
  source 1..157: mol_type = other RNA
gccattcgcagcataacgaaagaaactgacaatcgattttttcgggttcgattctatcccacttgactcaaagagtcagagggctcgaatacattttctgcacaggttttgctaatgcaagatctggggcaagaatgtgttcgggtcaaatgagtta

SEQ ID NO: 5289 - RNA, 299 nt, synthetic construct
  source 1..299: mol_type = other RNA
gctcgagtggagggaactgacaactgtagagtggagatcaccgacgaacgctggacctcaaagacgtgtggcatgtgcagatccatccaccgcgaacttggggcaaaagaactattcgagtgccccaactgccactacacctgccacagagacgtgcacggagctcgaaacatcttgctgagaagcttcggacagtttccagtctagaaaaacacgaactttttccttggcccaaggattgccaaacaccactcaaatcctcgttcaggggcctcgagtggctgggcatatatgggtta

SEQ ID NO: 5290 - RNA, 211 nt, synthetic construct
  source 1..211: mol_type = other RNA
attgcgataactgcaaatataacacacacagagacgttaatggtgctagaaatattttgctaaaatcgttgcgcatgtttccatttgtcaattcgcagttataattactctgtaacaattaggtcgatccatcctaaattcgaaagtccattgctacgagactttgcgtatgcttagtccagggcaattttctgccgaatgaaatgggtta

SEQ ID NO: 5291 - RNA, 299 nt, synthetic construct
  source 1..299: mol_type = other RNA
ggaggagggaggacaagctacaagacgtgccacaacgtgcgagcgtgtacgaaccgctctgtcgcatggtgtggaatagagacgtcaacgcagctcgtaacatagcttggatctgtatgagcatagtcagaggcgagggcaggccagcggagttcacgagagcaggaatgtgaggatgactgagaattagtcgaaagacatagctgcctagaaacgagttcatctaggcacttcggtgagaatccgagatacggctgggtactgtggcgagtgtgccattttactctgaacagactgta

SEQ ID NO: 5292 - protein, 74 aa, synthetic construct
SCGIDPGLRDFLTRKLATLSFYRFTQRLTHMGYKYGTEVVNVNEYLTTKECESCGMYADRDENAAKNILKVGLK

SEQ ID NO: 5293 - protein, 74 aa, synthetic construct; identical to SEQ ID NO: 5292

SEQ ID NO: 5294 - protein, 74 aa, synthetic construct; identical to SEQ ID NO: 5292

SEQ ID NO: 5295 - protein, 74 aa, synthetic construct; identical to SEQ ID NO: 5292

SEQ ID NO: 5296 - protein, 74 aa, synthetic construct
VIALDPGVRTFMTRAMLTWAHYRFKLTLRHQAEITGTTVVDVTEEYTSKRCPECGFTLPRDWNGAFGIFLKALR

SEQ ID NO: 5297 - protein, 73 aa, synthetic construct
AMGIDIGVRNLVTQNFVQLPFNMLIYQIKYKAEEIGITVIMQNEDYTSKRSATGKLIHADLQSSYNIIKKAIP

SEQ ID NO: 5298 - protein, 77 aa, synthetic construct
LCKWIDFTRDFLSEKVGGVLNPYQLTDQFTSFAKMGTQSGFLFYVPAPYTSKRFQNPEWPMDADANGAYHIALKGQL

SEQ ID NO: 5299 - DNA, 51 bp, synthetic construct; identical to SEQ ID NO: 5150
  source 1..51: mol_type = other DNA

SEQ ID NO: 5300 - DNA, 51 bp, synthetic construct; identical to SEQ ID NO: 5151
  source 1..51: mol_type = other DNA

SEQ ID NO: 5301 - RNA, 207 nt, synthetic construct
  source 1..207: mol_type = other RNA
caggggtacattccgctagtactccaccctacgggttaagcaaatgagaatatcgaaacggtatgcacaggattcttcgagtgataatcttaggatgactcactaaggagatgactaaagtgtatcattcaatattgtattgaacggtattcttccatagagacttgatttttggagtatccagaaatatcaactttttatgagcgg

SEQ ID NO: 5302 - RNA, 301 nt, synthetic construct
  source 1..301: mol_type = other RNA
gctcgagtggagggaactgacaactgtagagtggagatcaccgacgaacgctggacctcaaagacgtgtggcatgtgcagatccatccaccgcgaacttggggcaaaagaactattcgagtgccccaactgccactacacctgccacagagacgtgcacggagctcgaaacatcttgctgagaagcttcggacagtttccagtctagaaaaacacgaactttttccttggcccaaggattgccaaacaccactcaaatcctcgttcaggggcctcgagtggctgggcatatatatgggtta

SEQ ID NO: 5303 - RNA, 211 nt, synthetic construct; identical to SEQ ID NO: 5290
  source 1..211: mol_type = other RNA

SEQ ID NO: 5304 - RNA, 157 nt, synthetic construct
  source 1..157: mol_type = other RNA
gccattcgcagcataacgaaagaaactgacaatcgattctttcgggttcgattctatcccacttgactcaaagagtcagagggctcgaatacattctctgcacaggtcttgctaatgcaagatctggggcaagaatgtgttcgggtcaaatgagtta

SEQ ID NO: 5305 - DNA, 41 bp, synthetic construct
  source 1..41: mol_type = other DNA
ggggcagccacctccttgttattgggtaccgagctcgaatt

SEQ ID NO: 5306 - DNA, 31 bp, synthetic construct
  source 1..31: mol_type = other DNA
ggggcagccacctccttgccgagctcgaatt

SEQ ID NO: 5307 - DNA, 32 bp, synthetic construct
  source 1..32: mol_type = other DNA
ggggcagccacctccttgttattgctcgaatt

SEQ ID NO: 5308 - DNA, 39 bp, synthetic construct
  source 1..39: mol_type = other DNA
ggcggagacatcctttttttttgggaccgagagctagtt

SEQ ID NO: 5309 - DNA, 39 bp, synthetic construct
  source 1..39: mol_type = other DNA
ggggcagccacctccttgttattgtaccgagctcgaatt

SEQ ID NO: 5310 - DNA, 40 bp, synthetic construct
  source 1..40: mol_type = other DNA
ggggcagccacctccttgttattgggaccgggcttgaatt

SEQ ID NO: 5311 - DNA, 39 bp, synthetic construct
  source 1..39: mol_type = other DNA
ggggcagccacctccttgttattgggaacgagctcaatt

SEQ ID NO: 5312 - DNA, 40 bp, synthetic construct
  source 1..40: mol_type = other DNA
ggggcagccacctccttgttattgggaccgagctcgaatt

SEQ ID NO: 5313 - DNA, 40 bp, synthetic construct
  source 1..40: mol_type = other DNA
ggggcagccacctccttgttattggtaccgagctcgaatt

SEQ ID NO: 5314 - DNA, 40 bp, synthetic construct
  source 1..40: mol_type = other DNA
ggggcagccacctccttgttatgggtaccgagctcgaatt

SEQ ID NO: 5315 - DNA, 40 bp, synthetic construct
  source 1..40: mol_type = other DNA
ggggcagccacctccttgttacgggtaccgagctcgaatt

SEQ ID NO: 5316 - DNA, 47 bp, synthetic construct
  source 1..47: mol_type = other DNA
tttagcaagccacctccttgttattgggtaccgagctcgaattcact

SEQ ID NO: 5317 - DNA, 13 bp, synthetic construct
  source 1..13: mol_type = other DNA
tttagcaagccaa

SEQ ID NO: 5318 - DNA, 21 bp, synthetic construct
  source 1..21: mol_type = other DNA
tttagcaagccaaggaggtgc

SEQ ID NO: 5319 - DNA, 21 bp, synthetic construct
  source 1..21: mol_type = other DNA
tttagcaagctcgaattcact

SEQ ID NO: 5320 - DNA, 23 bp, synthetic construct
  source 1..23: mol_type = other DNA
tttagcaagccacctccttgtta

SEQ ID NO: 5321 - DNA, 30 bp, synthetic construct
  source 1..30: mol_type = other DNA
tttagcaagggtaccgagctcgaattcact

SEQ ID NO: 5322 - DNA, 33 bp, synthetic construct
  source 1..33: mol_type = other DNA
tttagcaagctgggtaccgagctcgaattcact

SEQ ID NO: 5323 - DNA, 34 bp, synthetic construct
  source 1..34: mol_type = other DNA
tttagcaagcgtgggtaccgagctcgaattcact

SEQ ID NO: 5324 - DNA, 35 bp, synthetic construct
  source 1..35: mol_type = other DNA
tttagcaagccacgggtaccgagctcgaattcact

SEQ ID NO: 5325 - DNA, 35 bp, synthetic construct
  source 1..35: mol_type = other DNA
tttagcaagccttgggtaccgagctcgaattcact

SEQ ID NO: 5326 - DNA, 37 bp, synthetic construct
  source 1..37: mol_type = other DNA
tttagcaagccacctccttgtcgagctcgaattcact

SEQ ID NO: 5327 - DNA, 38 bp, synthetic construct
  source 1..38: mol_type = other DNA
tttagcaagccacaatgggtaccgagctcgaattcact

SEQ ID NO: 5328 - DNA, 76 bp, synthetic construct
  source 1..76: mol_type = other DNA
tatgaatgtgaactttcaaaggccaattactaccccttagaagaacctaccatctctaaactacaaagatgggcag

SEQ ID NO: 5329 - DNA, 58 bp, synthetic construct
  source 1..58: mol_type = other DNA
tatgaatgtgaactttcaaaggccaattactatccctctaaactacaaagatgggcag

SEQ ID NO: 5330 - DNA, 74 bp, synthetic construct
  source 1..74: mol_type = other DNA
tatgaatgtgaactttaacatcacaattaatcttttttattaacataatacttctaaactacaaagatgggcag

SEQ ID NO: 5331 - DNA, 76 bp, synthetic construct
  source 1..76: mol_type = other DNA
tatgaatgtgaactttgacatctacaattctcctcctctataaaataaatactttctaaactacaaagatgggcag

SEQ ID NO: 5332 - DNA, 74 bp, synthetic construct
  source 1..74: mol_type = other DNA
tatgaatgtgaactttaaattttaaatctaacacttagaatttataatattttctaaactacaaagatgggcag

SEQ ID NO: 5333 - DNA, 75 bp, synthetic construct
  source 1..75: mol_type = other DNA
tatgaatgtgaacttttaaaaaccaaatatttcccctattataaaatcaaccatctaaactacaaagatgggcag

SEQ ID NO: 5334 - DNA, 75 bp, synthetic construct
  source 1..75: mol_type = other DNA
tatgaatgtgaacttttaaagcccaatttaaaacccttaaaaaaaccttcctctctaaactacaaagatgggcag

SEQ ID NO: 5335 - DNA, 74 bp, synthetic construct
  source 1..74: mol_type = other DNA
tatgaatgtgaactttcaaaggccaattactaccccttaagaacctaccatctctaaactacaaagatgggcag

SEQ ID NO: 5336 - DNA, 76 bp, synthetic construct
  source 1..76: mol_type = other DNA
tatgaatgtgaacttttaaaaacaacatactataccttttaaaaacatctactctctaaactacaaagatgggcag

SEQ ID NO: 5337 - DNA, 74 bp, synthetic construct
  source 1..74: mol_type = other DNA
tatgaatgtgaactttaatagtacattttactcctttaaaaaaaattcaatttctaaactacaaagatgggcag

SEQ ID NO: 5338 - DNA, 75 bp, synthetic construct
  source 1..75: mol_type = other DNA
tatgaatgtgaactttaaaggcccaattattaccattaaaaaaaaccaccatctctaaactacaaagatgggcag

SEQ ID NO: 5339 - DNA, 75 bp, synthetic construct
  source 1..75: mol_type = other DNA
tatgaatgtgaactttaaaagccaaatactaaccctttaaaaaaacttaccatcctaaactacaaagatgggcag

SEQ ID NO: 5340 - DNA, 75 bp, synthetic construct
  source 1..75: mol_type = other DNA
tatgaatgtgaactttaaaagccaaatactaaccctttaaaaaaactaccaattctaaactacaaagatgggcag

SEQ ID NO: 5341 - DNA, 74 bp, synthetic construct
  source 1..74: mol_type = other DNA
tatgaatgtgaactttaaaaacaattattatcccctataagaaactaccatctctaaactacaaagatgggcag

SEQ ID NO: 5342 - DNA, 75 bp, synthetic construct
  source 1..75: mol_type = other DNA
tatgaatgtgaacttcaaaaggcaaattcctacccctaaaaaaaacctacatttctaaactacaaagatgggcag

SEQ ID NO: 5343 - DNA, 74 bp, synthetic construct
  source 1..74: mol_type = other DNA
tatgaatgtgaacttacaaaccacttattcccccctataaaaaaatacaatctctaaactacaaagatgggcag

SEQ ID NO: 5344 - DNA, 75 bp, synthetic construct
  source 1..75: mol_type = other DNA
tatgaatgtgaactttaaaggcccattaatacccctttataaaaactcacactcctaaactacaaagatgggcag

SEQ ID NO: 5345 - DNA, 75 bp, synthetic construct
  source 1..75: mol_type = other DNA
tatgaatgtgaactttaaaggccaaattctaacccttttaaaaaccttcccttcctaaactacaaagatgggcag

SEQ ID NO: 5346 - DNA, 75 bp, synthetic construct
  source 1..75: mol_type = other DNA
tatgaatgtgaacttcaaaatgcctattcatctccttatacaaaactaaccattctaaactacaaagatgggcag

SEQ ID NO: 5347 - DNA, 75 bp, synthetic construct
  source 1..75: mol_type = other DNA
tatgaatgtgaacttccaaagacaatttataccccttaagaaaaacttacattcctaaactacaaagatgggcag

SEQ ID NO: 5348 - RNA, 301 nt, synthetic construct
  source 1..301: mol_type = other RNA
gccgccatggccgccggcggcggcggggccgggctgagagcctgaacgcgctagcagggcgtggggctgagggtgcacgtgttgattggcggcgagtgacgtgctagtttgttagctgcgggttagcacggactgtgcaccccaccccaccggccacgttccggattgcggggatgcaaaggcccccaacatagaggcgtgtgcttagtaggcgcccccgtcaaggtggctgggttgataacgacccgggaggggagggctcagcccttttcctgcctccctaaggcagccacctccttgt

SEQ ID NO: 5349 - RNA, 354 nt, synthetic construct
  source 1..354: mol_type = other RNA
cgtgatccgtgtgctcctcctgctgaagctgatgggcttcgagcggccraycaagctgcagcggccgccatggccgccgcggcggcggggccgggctgagagcctgaacggcgctagcagggcgtggggctgagggtgcaccgtgtygattggcggcgagtgacgtgactagtttgttagctgcgggttagcacggactgtgcaccccacccaaccggccaygtccggatttgcggggatgccaaaggcccccaacatagaggcgtgtgcttagtaggcgcccgcgtcaaggtggcgggttrataaygacccgggatcagcccttttcctgccataaggcagccacctycttgt

SEQ ID NO: 5350 - RNA, 225 nt, synthetic construct
  source 1..225: mol_type = other RNA
aaaaatagtctaataaaatcaggggtacatccgctagtactccaccctacgggtaagcaaatgagaatatcgaaacggtatgcacaggatctcgagtgataatctaggatgactcactaaggagatgactaaagtgtatcatcaatatgtatgaacggtatctccatagagagtgatggagtatccagaaatatcaactatgagcgggcagccacctcctgtatg

SEQ ID NO: 5351 - DNA, 60 bp, synthetic construct
  source 1..60: mol_type = other DNA
catgattacgccaagcttagaaacagcagccacctccttgttattgggtaccgagctcga

SEQ ID NO: 5352 - DNA, 60 bp, synthetic construct
  source 1..60: mol_type = other DNA
tcgagctcggtacccaataacaaggaggtggctgctgtttctaagcttggcgtaatcatg

SEQ ID NO: 5353 - RNA, 148 nt, synthetic construct
  source 1..148: mol_type = other RNA
ccccacccaaccggccatgtccggatgcggggatgccaaaggcccccaacatagaggcgtgtgctagtaggcacccgcgtcaaggtggctgggtgataacgacccgggatcagccctgtcctgccataaggcagccacctcctgtatg

SEQ ID NO: 5354 - RNA, 50 nt, synthetic construct
  source 1..50: mol_type = other RNA
tagagagttgatttctggagtatccagaaatatcaactctttatgagcgg

SEQ ID NO: 5355 - RNA, 50 nt, synthetic construct
  source 1..50: mol_type = other RNA
tagagagttgatttttggagtatccagaaatatcaactttttatgagcgg

SEQ ID NO: 5356 - DNA, 50 bp, synthetic construct
  source 1..50: mol_type = other DNA
tgcagagttgagtttcggagtatccggaaatctcaactttgcatgagcgg

SEQ ID NO: 5357 - RNA, 50 nt, synthetic construct
  source 1..50: mol_type = other RNA
tagagagttgaattctggagtatccagaaatttcaactctctatgagcgg
